United States Patent Application Publication US 2026/0103690 A1 - sequence listing, part 104

SEQ ID NO: 795454 - RNA, 225 nt, unidentified
  source 1..225: mol_type = unassigned RNA; note = ISSpe4
  misc_difference 3: note = a, c, u, g, unknown, or other
  misc_difference 8: note = a, c, u, g, unknown, or other
  misc_difference 9: note = a, c, u, g, unknown, or other
  misc_difference 10: note = a, c, u, g, unknown, or other
  misc_difference 12: note = a, c, u, g, unknown, or other
  misc_difference 13: note = a, c, u, g, unknown, or other
  misc_difference 14: note = a, c, u, g, unknown, or other
  misc_difference 15: note = a, c, u, g, unknown, or other
  misc_difference 17: note = a, c, u, g, unknown, or other
  misc_difference 18: note = a, c, u, g, unknown, or other
  misc_difference 20: note = a, c, u, g, unknown, or other
  misc_difference 23: note = a, c, u, g, unknown, or other
  misc_difference 27: note = a, c, u, g, unknown, or other
  misc_difference 28: note = a, c, u, g, unknown, or other
  misc_difference 29: note = a, c, u, g, unknown, or other
  misc_difference 30: note = a, c, u, g, unknown, or other
  misc_difference 31: note = a, c, u, g, unknown, or other
  misc_difference 35: note = a, c, u, g, unknown, or other
  misc_difference 36: note = a, c, u, g, unknown, or other
  misc_difference 37: note = a, c, u, g, unknown, or other
  misc_difference 41: note = a, c, u, g, unknown, or other
  misc_difference 49: note = a, c, u, g, unknown, or other
  misc_difference 50: note = a, c, u, g, unknown, or other
  misc_difference 52: note = a, c, u, g, unknown, or other
  misc_difference 53: note = a, c, u, g, unknown, or other
  misc_difference 54: note = a, c, u, g, unknown, or other
  misc_difference 55: note = a, c, u, g, unknown, or other
  misc_difference 56: note = a, c, u, g, unknown, or other
  misc_difference 61: note = a, c, u, g, unknown, or other
  misc_difference 68: note = a, c, u, g, unknown, or other
  misc_difference 72: note = a, c, u, g, unknown, or other
  misc_difference 73: note = a, c, u, g, unknown, or other
  misc_difference 74: note = a, c, u, g, unknown, or other
  misc_difference 75: note = a, c, u, g, unknown, or other
  misc_difference 81: note = a, c, u, g, unknown, or other
  misc_difference 84: note = a, c, u, g, unknown, or other
  misc_difference 85: note = a, c, u, g, unknown, or other
  misc_difference 86: note = a, c, u, g, unknown, or other
  misc_difference 87: note = a, c, u, g, unknown, or other
  misc_difference 88: note = a, c, u, g, unknown, or other
  misc_difference 89: note = a, c, u, g, unknown, or other
  misc_difference 91: note = a, c, u, g, unknown, or other
  misc_difference 92: note = a, c, u, g, unknown, or other
  misc_difference 96: note = a, c, u, g, unknown, or other
  misc_difference 97: note = a, c, u, g, unknown, or other
  misc_difference 98: note = a, c, u, g, unknown, or other
  misc_difference 99: note = a, c, u, g, unknown, or other
  misc_difference 100: note = a, c, u, g, unknown, or other
  misc_difference 104: note = a, c, u, g, unknown, or other
  misc_difference 109: note = a, c, u, g, unknown, or other
  misc_difference 110: note = a, c, u, g, unknown, or other
  misc_difference 111: note = a, c, u, g, unknown, or other
  misc_difference 112: note = a, c, u, g, unknown, or other
  misc_difference 113: note = a, c, u, g, unknown, or other
  misc_difference 114: note = a, c, u, g, unknown, or other
  misc_difference 117: note = a, c, u, g, unknown, or other
  misc_difference 118: note = a, c, u, g, unknown, or other
  misc_difference 119: note = a, c, u, g, unknown, or other
  misc_difference 122: note = a, c, u, g, unknown, or other
  misc_difference 123: note = a, c, u, g, unknown, or other
  misc_difference 124: note = a, c, u, g, unknown, or other
  misc_difference 125: note = a, c, u, g, unknown, or other
  misc_difference 126: note = a, c, u, g, unknown, or other
  misc_difference 127: note = a, c, u, g, unknown, or other
  misc_difference 128: note = a, c, u, g, unknown, or other
  misc_difference 131: note = a, c, u, g, unknown, or other
  misc_difference 132: note = a, c, u, g, unknown, or other
  misc_difference 136: note = a, c, u, g, unknown, or other
  misc_difference 138: note = a, c, u, g, unknown, or other
  misc_difference 145: note = a, c, u, g, unknown, or other
  misc_difference 146: note = a, c, u, g, unknown, or other
  misc_difference 149: note = a, c, u, g, unknown, or other
  misc_difference 151: note = a, c, u, g, unknown, or other
  misc_difference 152: note = a, c, u, g, unknown, or other
  misc_difference 156: note = a, c, u, g, unknown, or other
  misc_difference 158: note = a, c, u, g, unknown, or other
  misc_difference 161: note = a, c, u, g, unknown, or other
  misc_difference 162: note = a, c, u, g, unknown, or other
  misc_difference 167: note = a, c, u, g, unknown, or other
  misc_difference 169: note = a, c, u, g, unknown, or other
  misc_difference 178: note = a, c, u, g, unknown, or other
  misc_difference 184: note = a, c, u, g, unknown, or other
  misc_difference 195: note = a, c, u, g, unknown, or other
  misc_difference 196: note = a, c, u, g, unknown, or other
  misc_difference 197: note = a, c, u, g, unknown, or other
  misc_difference 201: note = a, c, u, g, unknown, or other
  misc_difference 202: note = a, c, u, g, unknown, or other
  misc_difference 203: note = a, c, u, g, unknown, or other
  misc_difference 204: note = a, c, u, g, unknown, or other
  misc_difference 205: note = a, c, u, g, unknown, or other
  misc_difference 206: note = a, c, u, g, unknown, or other
  misc_difference 207: note = a, c, u, g, unknown, or other
  misc_difference 208: note = a, c, u, g, unknown, or other
  misc_difference 209: note = a, c, u, g, unknown, or other
  misc_difference 210: note = a, c, u, g, unknown, or other
  misc_difference 211: note = a, c, u, g, unknown, or other
  misc_difference 212: note = a, c, u, g, unknown, or other
  misc_difference 214: note = a, c, u, g, unknown, or other
  misc_difference 215: note = a, c, u, g, unknown, or other
  misc_difference 223: note = a, c, u, g, unknown, or other
  misc_difference 224: note = a, c, u, g, unknown, or other
  misc_difference 225: note = a, c, u, g, unknown, or other
aynrrgcnnnrnnnnynnynrynyrrnnnnnryynnncaanrrrryrcnnrnnnnnagrtnaaraycnrcynnnnrarycngynnnnnnynnrgrnnnnnrarnycgynnnnnngrnnngrnnnnnnngtnngcgnanayatcrnngrncnngrgntngcnnctcanynaragcycgnayatangyrcgcrtytnnnyytnnnnnnnnnnnntnnttgyyrannn

SEQ ID NO: 795455 - RNA, 221 nt, unidentified
  source 1..221: mol_type = unassigned RNA; note = ISMlo3
  misc_difference 1: note = a, c, u, g, unknown, or other
  misc_difference 2: note = a, c, u, g, unknown, or other
  misc_difference 21: note = a, c, u, g, unknown, or other
  misc_difference 24: note = a, c, u, g, unknown, or other
  misc_difference 53: note = a, c, u, g, unknown, or other
  misc_difference 65: note = a, c, u, g, unknown, or other
  misc_difference 66: note = a, c, u, g, unknown, or other
  misc_difference 74: note = a, c, u, g, unknown, or other
  misc_difference 84: note = a, c, u, g, unknown, or other
  misc_difference 91: note = a, c, u, g, unknown, or other
  misc_difference 92: note = a, c, u, g, unknown, or other
  misc_difference 100: note = a, c, u, g, unknown, or other
  misc_difference 109: note = a, c, u, g, unknown, or other
  misc_difference 119: note = a, c, u, g, unknown, or other
  misc_difference 120: note = a, c, u, g, unknown, or other
  misc_difference 139: note = a, c, u, g, unknown, or other
  misc_difference 140: note = a, c, u, g, unknown, or other
  misc_difference 141: note = a, c, u, g, unknown, or other
  misc_difference 142: note = a, c, u, g, unknown, or other
  misc_difference 143: note = a, c, u, g, unknown, or other
  misc_difference 145: note = a, c, u, g, unknown, or other
  misc_difference 153: note = a, c, u, g, unknown, or other
  misc_difference 167: note = a, c, u, g, unknown, or other
  misc_difference 184: note = a, c, u, g, unknown, or other
  misc_difference 185: note = a, c, u, g, unknown, or other
  misc_difference 186: note = a, c, u, g, unknown, or other
  misc_difference 187: note = a, c, u, g, unknown, or other
  misc_difference 193: note = a, c, u, g, unknown, or other
  misc_difference 194: note = a, c, u, g, unknown, or other
  misc_difference 195: note = a, c, u, g, unknown, or other
  misc_difference 201: note = a, c, u, g, unknown, or other
  misc_difference 202: note = a, c, u, g, unknown, or other
  misc_difference 203: note = a, c, u, g, unknown, or other
  misc_difference 204: note = a, c, u, g, unknown, or other
  misc_difference 206: note = a, c, u, g, unknown, or other
  misc_difference 208: note = a, c, u, g, unknown, or other
nnrrrrttgyragrrcgaygngangtgatggcrraccggtcagrccgggrrynrggacaacccrnnrrrygtcnrrggcrtyrnagccygnnaarcagantgggaccynrtycgcggannccatcarggccagcrgtcnnnnnynacygcrynaacaggccgracanargactgcacccgaccnnnncgccannncrtcannnnrnyncttgcaaygcggg

SEQ ID NO: 795456 - RNA, 238 nt, unidentified
  source 1..238: mol_type = unassigned RNA; note = ISXne4
  misc_difference 5: note = a, c, u, g, unknown, or other
  misc_difference 20: note = a, c, u, g, unknown, or other
  misc_difference 21: note = a, c, u, g, unknown, or other
  misc_difference 22: note = a, c, u, g, unknown, or other
  misc_difference 25: note = a, c, u, g, unknown, or other
  misc_difference 27: note = a, c, u, g, unknown, or other
  misc_difference 28: note = a, c, u, g, unknown, or other
  misc_difference 31: note = a, c, u, g, unknown, or other
  misc_difference 32: note = a, c, u, g, unknown, or other
  misc_difference 33: note = a, c, u, g, unknown, or other
  misc_difference 42: note = a, c, u, g, unknown, or other
  misc_difference 43: note = a, c, u, g, unknown, or other
  misc_difference 44: note = a, c, u, g, unknown, or other
  misc_difference 45: note = a, c, u, g, unknown, or other
  misc_difference 47: note = a, c, u, g, unknown, or other
  misc_difference 51: note = a, c, u, g, unknown, or other
  misc_difference 58: note = a, c, u, g, unknown, or other
  misc_difference 66: note = a, c, u, g, unknown, or other
  misc_difference 75: note = a, c, u, g, unknown, or other
  misc_difference 77: note = a, c, u, g, unknown, or other
  misc_difference 78: note = a, c, u, g, unknown, or other
  misc_difference 79: note = a, c, u, g, unknown, or other
  misc_difference 80: note = a, c, u, g, unknown, or other
  misc_difference 81: note = a, c, u, g, unknown, or other
  misc_difference 82: note = a, c, u, g, unknown, or other
  misc_difference 83: note = a, c, u, g, unknown, or other
  misc_difference 84: note = a, c, u, g, unknown, or other
  misc_difference 89: note = a, c, u, g, unknown, or other
  misc_difference 90: note = a, c, u, g, unknown, or other
  misc_difference 91: note = a, c, u, g, unknown, or other
  misc_difference 92: note = a, c, u, g, unknown, or other
  misc_difference 98: note = a, c, u, g, unknown, or other
  misc_difference 100: note = a, c, u, g, unknown, or other
  misc_difference 101: note = a, c, u, g, unknown, or other
  misc_difference 104: note = a, c, u, g, unknown, or other
  misc_difference 124: note = a, c, u, g, unknown, or other
  misc_difference 129: note = a, c, u, g, unknown, or other
  misc_difference 133: note = a, c, u, g, unknown, or other
  misc_difference 135: note = a, c, u, g, unknown, or other
  misc_difference 140: note = a, c, u, g, unknown, or other
  misc_difference 145: note = a, c, u, g, unknown, or other
  misc_difference 146: note = a, c, u, g, unknown, or other
  misc_difference 147: note = a, c, u, g, unknown, or other
  misc_difference 148: note = a, c, u, g, unknown, or other
  misc_difference 149: note = a, c, u, g, unknown, or other
  misc_difference 150: note = a, c, u, g, unknown, or other
  misc_difference 152: note = a, c, u, g, unknown, or other
  misc_difference 158: note = a, c, u, g, unknown, or other
  misc_difference 159: note = a, c, u, g, unknown, or other
  misc_difference 160: note = a, c, u, g, unknown, or other
  misc_difference 167: note = a, c, u, g, unknown, or other
  misc_difference 175: note = a, c, u, g, unknown, or other
  misc_difference 184: note = a, c, u, g, unknown, or other
  misc_difference 185: note = a, c, u, g, unknown, or other
  misc_difference 186: note = a, c, u, g, unknown, or other
  misc_difference 189: note = a, c, u, g, unknown, or other
  misc_difference 192: note = a, c, u, g, unknown, or other
  misc_difference 193: note = a, c, u, g, unknown, or other
  misc_difference 194: note = a, c, u, g, unknown, or other
  misc_difference 198: note = a, c, u, g, unknown, or other
  misc_difference 199: note = a, c, u, g, unknown, or other
  misc_difference 200: note = a, c, u, g, unknown, or other
  misc_difference 201: note = a, c, u, g, unknown, or other
  misc_difference 203: note = a, c, u, g, unknown, or other
  misc_difference 204: note = a, c, u, g, unknown, or other
  misc_difference 205: note = a, c, u, g, unknown, or other
  misc_difference 206: note = a, c, u, g, unknown, or other
  misc_difference 207: note = a, c, u, g, unknown, or other
  misc_difference 209: note = a, c, u, g, unknown, or other
  misc_difference 210: note = a, c, u, g, unknown, or other
  misc_difference 211: note = a, c, u, g, unknown, or other
  misc_difference 214: note = a, c, u, g, unknown, or other
  misc_difference 216: note = a, c, u, g, unknown, or other
  misc_difference 217: note = a, c, u, g, unknown, or other
  misc_difference 221: note = a, c, u, g, unknown, or other
  misc_difference 222: note = a, c, u, g, unknown, or other
  misc_difference 223: note = a, c, u, g, unknown, or other
  misc_difference 227: note = a, c, u, g, unknown, or other
  misc_difference 235: note = a, c, u, g, unknown, or other
  misc_difference 238: note = a, c, u, g, unknown, or other
rygrnygyyraaaggttgcnnnrgnrnnyrnnngtgatgrcnnnnynggtnrgaccgngryyyrynaarcctgrntnnnnnnnngrrcnnnnrgyycnynnrrnraatraggyrygrrtcagcnrryyncatnrnggcyngcagnnnnnnrnctgcannnaggycgnrtatrrrnyygcrrycnnnycngtnnnrtynnnnynnnnnrnnnyynynncrrnnnggrngcgyycanryn

SEQ ID NO: 795457 - RNA, 197 nt, unidentified
  source 1..197: mol_type = unassigned RNA; note = ISCps1
  misc_difference 1: note = a, c, u, g, unknown, or other
  misc_difference 2: note = a, c, u, g, unknown, or other
  misc_difference 3: note = a, c, u, g, unknown, or other
  misc_difference 4: note = a, c, u, g, unknown, or other
  misc_difference 5: note = a, c, u, g, unknown, or other
  misc_difference 6: note = a, c, u, g, unknown, or other
  misc_difference 10: note = a, c, u, g, unknown, or other
  misc_difference 11: note = a, c, u, g, unknown, or other
  misc_difference 15: note = a, c, u, g, unknown, or other
  misc_difference 16: note = a, c, u, g, unknown, or other
  misc_difference 21: note = a, c, u, g, unknown, or other
  misc_difference 23: note = a, c, u, g, unknown, or other
  misc_difference 24: note = a, c, u, g, unknown, or other
  misc_difference 25: note = a, c, u, g, unknown, or other
  misc_difference 27: note = a, c, u, g, unknown, or other
  misc_difference 28: note = a, c, u, g, unknown, or other
  misc_difference 39: note = a, c, u, g, unknown, or other
  misc_difference 44: note = a, c, u, g, unknown, or other
  misc_difference 45: note = a, c, u, g, unknown, or other
  misc_difference 47: note = a, c, u, g, unknown, or other
  misc_difference 56: note = a, c, u, g, unknown, or other
  misc_difference 59: note = a, c, u, g, unknown, or other
  misc_difference 60: note = a, c, u, g, unknown, or other
  misc_difference 61: note = a, c, u, g, unknown, or other
  misc_difference 62: note = a, c, u, g, unknown, or other
  misc_difference 64: note = a, c, u, g, unknown, or other
  misc_difference 65: note = a, c, u, g, unknown, or other
  misc_difference 66: note = a, c, u, g, unknown, or other
  misc_difference 70: note = a, c, u, g, unknown, or other
  misc_difference 71: note = a, c, u, g, unknown, or other
  misc_difference 72: note = a, c, u, g, unknown, or other
  misc_difference 73: note = a, c, u, g, unknown, or other
  misc_difference 76: note = a, c, u, g, unknown, or other
  misc_difference 77: note = a, c, u, g, unknown, or other
  misc_difference 82: note = a, c, u, g, unknown, or other
  misc_difference 83: note = a, c, u, g, unknown, or other
  misc_difference 84: note = a, c, u, g, unknown, or other
  misc_difference 85: note = a, c, u, g, unknown, or other
  misc_difference 86: note = a, c, u, g, unknown, or other
  misc_difference 87: note = a, c, u, g, unknown, or other
  misc_difference 89: note = a, c, u, g, unknown, or other
  misc_difference 90: note = a, c, u, g, unknown, or other
  misc_difference 91: note = a, c, u, g, unknown, or other
  misc_difference 95: note = a, c, u, g, unknown, or other
  misc_difference 96: note = a, c, u, g, unknown, or other
  misc_difference 97: note = a, c, u, g, unknown, or other
  misc_difference 98: note = a, c, u, g, unknown, or other
  misc_difference 99: note = a, c, u, g, unknown, or other
  misc_difference 107: note = a, c, u, g, unknown, or other
  misc_difference 116: note = a, c, u, g, unknown, or other
  misc_difference 131: note = a, c, u, g, unknown, or other
  misc_difference 133: note = a, c, u, g, unknown, or other
  misc_difference 138: note = a, c, u, g, unknown, or other
  misc_difference 140: note = a, c, u, g, unknown, or other
  misc_difference 145: note = a, c, u, g, unknown, or other
  misc_difference 149: note = a, c, u, g, unknown, or other
  misc_difference 155: note = a, c, u, g, unknown, or other
  misc_difference 166: note = a, c, u, g, unknown, or other
  misc_difference 168: note = a, c, u, g, unknown, or other
  misc_difference 169: note = a, c, u, g, unknown, or other
  misc_difference 174: note = a, c, u, g, unknown, or other
  misc_difference 175: note = a, c, u, g, unknown, or other
  misc_difference 176: note = a, c, u, g, unknown, or other
  misc_difference 177: note = a, c, u, g, unknown, or other
  misc_difference 178: note = a, c, u, g, unknown, or other
  misc_difference 179: note = a, c, u, g, unknown, or other
  misc_difference 180: note = a, c, u, g, unknown, or other
  misc_difference 181: note = a, c, u, g, unknown, or other
  misc_difference 183: note = a, c, u, g, unknown, or other
  misc_difference 184: note = a, c, u, g, unknown, or other
  misc_difference 189: note = a, c, u, g, unknown, or other
  misc_difference 190: note = a, c, u, g, unknown, or other
  misc_difference 192: note = a, c, u, g, unknown, or other
  misc_difference 194: note = a, c, u, g, unknown, or other
  misc_difference 195: note = a, c, u, g, unknown, or other
nnnnnnttynncrrnnrrrynynnnannagrtragaycnrcyynnrnrrarcctgnyynnnnynnnggynnnnrannccrynnnnnnrnnnaggnnnnnrggygcgnayacatyrnrggyyrgrgrtagcnynyycanynararnccgnatatangyrygcryctnrnntyyrnnnnnnnnynnttgynnrnynnrr

SEQ ID NO: 795458 - RNA, 181 nt, unidentified
  source 1..181: mol_type = unassigned RNA; note = ISPye22
  misc_difference 1: note = a, c, u, g, unknown, or other
  misc_difference 2: note = a, c, u, g, unknown, or other
  misc_difference 3: note = a, c, u, g, unknown, or other
  misc_difference 4: note = a, c, u, g, unknown, or other
  misc_difference 5: note = a, c, u, g, unknown, or other
  misc_difference 12: note = a, c, u, g, unknown, or other
  misc_difference 13: note = a, c, u, g, unknown, or other
  misc_difference 19: note = a, c, u, g, unknown, or other
  misc_difference 20: note = a, c, u, g, unknown, or other
  misc_difference 21: note = a, c, u, g, unknown, or other
  misc_difference 23: note = a, c, u, g, unknown, or other
  misc_difference 24: note = a, c, u, g, unknown, or other
  misc_difference 31: note = a, c, u, g, unknown, or other
  misc_difference 40: note = a, c, u, g, unknown, or other
  misc_difference 44: note = a, c, u, g, unknown, or other
  misc_difference 45: note = a, c, u, g, unknown, or other
  misc_difference 47: note = a, c, u, g, unknown, or other
  misc_difference 51: note = a, c, u, g, unknown, or other
  misc_difference 57: note = a, c, u, g, unknown, or other
  misc_difference 58: note = a, c, u, g, unknown, or other
  misc_difference 59: note = a, c, u, g, unknown, or other
  misc_difference 60: note = a, c, u, g, unknown, or other
  misc_difference 61: note = a, c, u, g, unknown, or other
  misc_difference 62: note = a, c, u, g, unknown, or other
  misc_difference 63: note = a, c, u, g, unknown, or other
  misc_difference 68: note = a, c, u, g, unknown, or other
  misc_difference 72: note = a, c, u, g, unknown, or other
  misc_difference 73: note = a, c, u, g, unknown, or other
  misc_difference 74: note = a, c, u, g, unknown, or other
  misc_difference 75: note = a, c, u, g, unknown, or other
  misc_difference 76: note = a, c, u, g, unknown, or other
  misc_difference 77: note = a, c, u, g, unknown, or other
  misc_difference 78: note = a, c, u, g, unknown, or other
  misc_difference 79: note = a, c, u, g, unknown, or other
  misc_difference 80: note = a, c, u, g, unknown, or other
  misc_difference 81: note = a, c, u, g, unknown, or other
  misc_difference 82: note = a, c, u, g, unknown, or other
  misc_difference 83: note = a, c, u, g, unknown, or other
  misc_difference 88: note = a, c, u, g, unknown, or other
  misc_difference 92: note = a, c, u, g, unknown, or other
  misc_difference 93: note = a, c, u, g, unknown, or other
  misc_difference 94: note = a, c, u, g, unknown, or other
  misc_difference 95: note = a, c, u, g, unknown, or other
  misc_difference 96: note = a, c, u, g, unknown, or other
  misc_difference 105: note = a, c, u, g, unknown, or other
  misc_difference 108: note = a, c, u, g, unknown, or other
  misc_difference 110: note = a, c, u, g, unknown, or other
  misc_difference 111: note = a, c, u, g, unknown, or other
  misc_difference 112: note = a, c, u, g, unknown, or other
  misc_difference 117: note = a, c, u, g, unknown, or other
  misc_difference 126: note = a, c, u, g, unknown, or other
  misc_difference 127: note = a, c, u, g, unknown, or other
  misc_difference 130: note = a, c, u, g, unknown, or other
  misc_difference 135: note = a, c, u, g, unknown, or other
  misc_difference 136: note = a, c, u, g, unknown, or other
  misc_difference 137: note = a, c, u, g, unknown, or other
  misc_difference 138: note = a, c, u, g, unknown, or other
  misc_difference 139: note = a, c, u, g, unknown, or other
  misc_difference 140: note = a, c, u, g, unknown, or other
  misc_difference 147: note = a, c, u, g, unknown, or other
  misc_difference 163: note = a, c, u, g, unknown, or other
  misc_difference 169: note = a, c, u, g, unknown, or other
  misc_difference 175: note = a, c, u, g, unknown, or other
  misc_difference 176: note = a, c, u, g, unknown, or other
  misc_difference 177: note = a, c, u, g, unknown, or other
  misc_difference 178: note = a, c, u, g, unknown, or other
  misc_difference 179: note = a, c, u, g, unknown, or other
  misc_difference 180: note = a, c, u, g, unknown, or other
  misc_difference 181: note = a, c, u, g, unknown, or other
nnnnnyyygyynnrgyggnnnrnngtccyrncgggacgrnggynnrnyrancycgynnnnnnnryygngrynnnnnnnnnnnnrayyncgynnnnnacatygrgnyrnynnnyyycnrayrccatnntgnggcrnnnnnnyygaccncgraragaaccrygrnyccgrnrrryrnnnnnnn

SEQ ID NO: 795459 - RNA, 203 nt, unidentified
  source 1..203: mol_type = unassigned RNA; note = ISFac9
  misc_difference 1: note = a, c, u, g, unknown, or other
  misc_difference 2: note = a, c, u, g, unknown, or other
  misc_difference 4: note = a, c, u, g, unknown, or other
  misc_difference 9: note = a, c, u, g, unknown, or other
  misc_difference 13: note = a, c, u, g, unknown, or other
  misc_difference 14: note = a, c, u, g, unknown, or other
  misc_difference 15: note = a, c, u, g, unknown, or other
  misc_difference 16: note = a, c, u, g, unknown, or other
  misc_difference 17: note = a, c, u, g, unknown, or other
  misc_difference 18: note = a, c, u, g, unknown, or other
  misc_difference 19: note = a, c, u, g, unknown, or other
  misc_difference 20: note = a, c, u, g, unknown, or other
  misc_difference 25: note = a, c, u, g, unknown, or other
  misc_difference 26: note = a, c, u, g, unknown, or other
  misc_difference 27: note = a, c, u, g, unknown, or other
  misc_difference 28: note = a, c, u, g, unknown, or other
  misc_difference 29: note = a, c, u, g, unknown, or other
  misc_difference 30: note = a, c, u, g, unknown, or other
  misc_difference 31: note = a, c, u, g, unknown, or other
  misc_difference 32: note = a, c, u, g, unknown, or other
  misc_difference 33: note = a, c, u, g, unknown, or other
  misc_difference 35: note = a, c, u, g, unknown, or other
  misc_difference 36: note = a, c, u, g, unknown, or other
  misc_difference 37: note = a, c, u, g, unknown, or other
  misc_difference 39: note = a, c, u, g, unknown, or other
  misc_difference 40: note = a, c, u, g, unknown, or other
  misc_difference 43: note = a, c, u, g, unknown, or other
  misc_difference 45: note = a, c, u, g, unknown, or other
  misc_difference 46: note = a, c, u, g, unknown, or other
  misc_difference 50: note = a, c, u, g, unknown, or other
  misc_difference 51: note = a, c, u, g, unknown, or other
  misc_difference 53: note = a, c, u, g, unknown, or other
  misc_difference 56: note = a, c, u, g, unknown, or other
  misc_difference 57: note = a, c, u, g, unknown, or other
  misc_difference 59: note = a, c, u, g, unknown, or other
  misc_difference 60: note = a, c, u, g, unknown, or other
  misc_difference 61: note = a, c, u, g, unknown, or other
  misc_difference 62: note = a, c, u, g, unknown, or other
  misc_difference 63: note = a, c, u, g, unknown, or other
  misc_difference 64: note = a, c, u, g, unknown, or other
  misc_difference 65: note = a, c, u, g, unknown, or other
  misc_difference 66: note = a, c, u, g, unknown, or other
  misc_difference 67: note = a, c, u, g, unknown, or other
  misc_difference 68: note = a, c, u, g, unknown, or other
  misc_difference 69: note = a, c, u, g, unknown, or other
  misc_difference 70: note = a, c, u, g, unknown, or other
  misc_difference 72: note = a, c, u, g, unknown, or other
  misc_difference 79: note = a, c, u, g, unknown, or other
  misc_difference 80: note = a, c, u, g, unknown, or other
  misc_difference 83: note = a, c, u, g, unknown, or other
  misc_difference 85: note = a, c, u, g, unknown, or other
  misc_difference 86: note = a, c, u, g, unknown, or other
  misc_difference 87: note = a, c, u, g, unknown, or other
  misc_difference 88: note = a, c, u, g, unknown, or other
  misc_difference 89: note = a, c, u, g, unknown, or other
  misc_difference 90: note = a, c, u, g, unknown, or other
  misc_difference 91: note = a, c, u, g, unknown, or other
  misc_difference 93: note = a, c, u, g, unknown, or other
  misc_difference 96: note = a, c, u, g, unknown, or other
  misc_difference 97: note = a, c, u, g, unknown, or other
  misc_difference 98: note = a, c, u, g, unknown, or other
  misc_difference 99: note = a, c, u, g, unknown, or other
  misc_difference 102: note = a, c, u, g, unknown, or other
  misc_difference 105: note = a, c, u, g, unknown, or other
  misc_difference 108: note = a, c, u, g, unknown, or other
  misc_difference 110: note = a, c, u, g, unknown, or other
  misc_difference 111: note = a, c, u, g, unknown, or other
  misc_difference 112: note = a, c, u, g, unknown, or other
  misc_difference 114: note = a, c, u, g, unknown, or other
  misc_difference 115: note = a, c, u, g, unknown, or other
  misc_difference 116: note = a, c, u, g, unknown, or other
  misc_difference 120: note = a, c, u, g, unknown, or other
  misc_difference 124: note = a, c, u, g, unknown, or other
  misc_difference 125: note = a, c, u, g, unknown, or other
  misc_difference 126: note = a, c, u, g, unknown, or other
  misc_difference 127: note = a, c, u, g, unknown, or other
  misc_difference 129: note = a, c, u, g, unknown, or other
  misc_difference 130: note = a, c, u, g, unknown, or other
  misc_difference 131: note = a, c, u, g, unknown, or other
  misc_difference 132: note = a, c, u, g, unknown, or other
  misc_difference 136: note = a, c, u, g, unknown, or other
  misc_difference 137: note = a, c, u, g, unknown, or other
  misc_difference 138: note = a, c, u, g, unknown, or other
  misc_difference 141: note = a, c, u, g, unknown, or other
  misc_difference 143: note = a, c, u, g, unknown, or other
  misc_difference 144: note = a, c, u, g, unknown, or other
  misc_difference 147: note = a, c, u, g, unknown, or other
  misc_difference 150: note = a, c, u, g, unknown, or other
  misc_difference 155: note = a, c, u, g, unknown, or other
  misc_difference 156: note = a, c, u, g, unknown, or other
  misc_difference 162: note = a, c, u, g, unknown, or other
  misc_difference 163: note = a, c, u, g, unknown, or other
  misc_difference 164: note = a, c, u, g, unknown, or other
  misc_difference 165: note = a, c, u, g, unknown, or other
  misc_difference 167: note = a, c, u, g, unknown, or other
  misc_difference 170: note = a, c, u, g, unknown, or other
  misc_difference 173: note = a, c, u, g, unknown, or other
  misc_difference 174: note = a, c, u, g, unknown, or other
  misc_difference 178: note = a, c, u, g, unknown, or other
  misc_difference 180: note = a, c, u, g, unknown, or other
  misc_difference 181: note = a, c, u, g, unknown, or other
  misc_difference 182: note = a, c, u, g, unknown, or other
  misc_difference 183: note = a, c, u, g, unknown, or other
  misc_difference 184: note = a, c, u, g, unknown, or other
  misc_difference 185: note = a, c, u, g, unknown, or other
  misc_difference 186: note = a, c, u, g, unknown, or other
  misc_difference 187: note = a, c, u, g, unknown, or other
  misc_difference 189: note = a, c, u, g, unknown, or other
  misc_difference 194: note = a, c, u, g, unknown, or other
  misc_difference 197: note = a, c, u, g, unknown, or other
  misc_difference 199: note = a, c, u, g, unknown, or other
  misc_difference 200: note = a, c, u, g, unknown, or other
  misc_difference 201: note = a, c, u, g, unknown, or other
  misc_difference 203: note = a, c, u, g, unknown, or other
nntnayyyntaynnnnnnnnaryynnnnnnnnnynnnrnnyrnrnnrgrnnrnrgnnrnnnnnnnnnnnnrnrrryytnnrynynnnnnnnynyrnnnnyyntrnyynynnnynnnratnrgcnnnntnnnncyynnnrgnrnnrtnaynrrtrnntryrrnnnnanyrnytnntcynynnnnnnnnrnrggynrrnannnrn

SEQ ID NO: 795460 - RNA, 145 nt, unidentified
  source 1..145: mol_type = unassigned RNA; note = ISGme8
  misc_difference 1: note = a, c, u, g, unknown, or other
  misc_difference 2: note = a, c, u, g, unknown, or other
  misc_difference 3: note = a, c, u, g, unknown, or other
  misc_difference 4: note = a, c, u, g, unknown, or other
  misc_difference 5: note = a, c, u, g, unknown, or other
  misc_difference 17: note = a, c, u, g, unknown, or other
  misc_difference 21: note = a, c, u, g, unknown, or other
  misc_difference 23: note = a, c, u, g, unknown, or other
  misc_difference 24: note = a, c, u, g, unknown, or other
  misc_difference 25: note = a, c, u, g, unknown, or other
  misc_difference 26: note = a, c, u, g, unknown, or other
  misc_difference 29: note = a, c, u, g, unknown, or other
  misc_difference 30: note = a, c, u, g, unknown, or other
  misc_difference 33: note = a, c, u, g, unknown, or other
  misc_difference 35: note = a, c, u, g, unknown, or other
  misc_difference 36: note = a, c, u, g, unknown, or other
  misc_difference 37: note = a, c, u, g, unknown, or other
  misc_difference 41: note = a, c, u, g, unknown, or other
  misc_difference 46: note = a, c, u, g, unknown, or other
  misc_difference 47: note = a, c, u, g, unknown, or other
  misc_difference 48: note = a, c, u, g, unknown, or other
  misc_difference 49: note = a, c, u, g, unknown, or other
  misc_difference 50: note = a, c, u, g, unknown, or other
  misc_difference 54: note = a, c, u, g, unknown, or other
  misc_difference 55: note = a, c, u, g, unknown, or other
  misc_difference 59: note = a, c, u, g, unknown, or other
  misc_difference 70: note = a, c, u, g, unknown, or other
  misc_difference 71: note = a, c, u, g, unknown, or other
  misc_difference 75: note = a, c, u, g, unknown, or other
  misc_difference 77: note = a, c, u, g, unknown, or other
  misc_difference 78: note = a, c, u, g, unknown, or other
  misc_difference 79: note = a, c, u, g, unknown, or other
  misc_difference 80: note = a, c, u, g, unknown, or other
  misc_difference 97: note = a, c, u, g, unknown, or other
  misc_difference 103: note = a, c, u, g, unknown, or other
  misc_difference 104: note = a, c, u, g, unknown, or other
  misc_difference 105: note = a, c, u, g, unknown, or other
  misc_difference 117: note = a, c, u, g, unknown, or other
  misc_difference 125: note = a, c, u, g, unknown, or other
  misc_difference 126: note = a, c, u, g, unknown, or other
  misc_difference 130: note = a, c, u, g, unknown, or other
  misc_difference 131: note = a, c, u, g, unknown, or other
  misc_difference 132: note = a, c, u, g, unknown, or other
  misc_difference 133: note = a, c, u, g, unknown, or other
  misc_difference 134: note = a, c, u, g, unknown, or other
  misc_difference 135: note = a, c, u, g, unknown, or other
  misc_difference 136: note = a, c, u, g, unknown, or other
  misc_difference 141: note = a, c, u, g, unknown, or other
  misc_difference 142: note = a, c, u, g, unknown, or other
  misc_difference 143: note = a, c, u, g, unknown, or other
  misc_difference 144: note = a, c, u, g, unknown, or other
  misc_difference 145: note = a, c, u, g, unknown, or other
nnnnnrrrygygryagnycgnynnnncynnggncnnnragnccgynnnnnagcnnrggncgycryryyynnyyynynnnnarcccgaacagttgcyngggccnnngagcccgyatynygcaaggnngggnnnnnnnggagnnnnn

SEQ ID NO: 795461 - RNA, 229 nt, unidentified
  source 1..229: mol_type = unassigned RNA; note = ISFnu4
  misc_difference 10: note = a, c, u, g, unknown, or other
  misc_difference 11: note = a, c, u, g, unknown, or other
  misc_difference 12: note = a, c, u, g, unknown, or other
  misc_difference 13: note = a, c, u, g, unknown, or other
  misc_difference 14: note = a, c, u, g, unknown, or other
  misc_difference 16: note = a, c, u, g, unknown, or other
  misc_difference 17: note = a, c, u, g, unknown, or other
  misc_difference 18: note = a, c, u, g, unknown, or other
  misc_difference 20: note = a, c, u, g, unknown, or other
  misc_difference 21: note = a, c, u, g, unknown, or other
  misc_difference 23: note = a, c, u, g, unknown, or other
  misc_difference 24: note = a, c, u, g, unknown, or other
  misc_difference 25: note = a, c, u, g, unknown, or other
  misc_difference 26: note = a, c, u, g, unknown, or other
  misc_difference 27: note = a, c, u, g, unknown, or other
  misc_difference 28: note = a, c, u, g, unknown, or other
  misc_difference 34: note = a, c, u, g, unknown, or other
  misc_difference 43: note = a, c, u, g, unknown, or other
  misc_difference 44: note = a, c, u, g, unknown, or other
  misc_difference 45: note = a, c, u, g, unknown, or other
  misc_difference 46: note = a, c, u, g, unknown, or other
  misc_difference 47: note = a, c, u, g, unknown, or other
  misc_difference 48: note = a, c, u, g, unknown, or other
  misc_difference 49: note = a, c, u, g, unknown, or other
  misc_difference 50: note = a, c, u, g, unknown, or other
  misc_difference 51: note = a, c, u, g, unknown, or other
  misc_difference 52: note = a, c, u, g, unknown, or other
  misc_difference 54: note = a, c, u, g, unknown, or other
  misc_difference 58: note = a, c, u, g, unknown, or other
  misc_difference 65: note = a, c, u, g, unknown, or other
  misc_difference 66: note = a, c, u, g, unknown, or other
  misc_difference 88: note = a, c, u, g, unknown, or other
  misc_difference 91: note = a, c, u, g, unknown, or other
  misc_difference 92: note = a, c, u, g, unknown, or other
  misc_difference 94: note = a, c, u, g, unknown, or other
  misc_difference 95: note = a, c, u, g, unknown, or other
  misc_difference 104: note = a, c, u, g, unknown, or other
  misc_difference 115: note = a, c, u, g, unknown, or other
  misc_difference 117: note = a, c, u, g, unknown, or other
  misc_difference 133: note = a, c, u, g, unknown, or other
  misc_difference 143: note = a, c, u, g, unknown, or other
  misc_difference 146: note = a, c, u, g, unknown, or other
  misc_difference 163: note = a, c, u, g, unknown, or other
  misc_difference 169: note = a, c, u, g, unknown, or other
  misc_difference 174: note = a, c, u, g, unknown, or other
  misc_difference 180: note = a, c, u, g, unknown, or other
  misc_difference 183: note = a, c, u, g, unknown, or other
  misc_difference 184: note = a, c, u, g, unknown, or other
  misc_difference 185: note = a, c, u, g, unknown, or other
  misc_difference 190: note = a, c, u, g, unknown, or other
  misc_difference 197: note = a, c, u, g, unknown, or other
  misc_difference 203: note = a, c, u, g, unknown, or other
  misc_difference 204: note = a, c, u, g, unknown, or other
  misc_difference 205: note = a, c, u, g, unknown, or other
  misc_difference 207: note = a, c, u, g, unknown, or other
  misc_difference 208: note = a, c, u, g, unknown, or other
  misc_difference 214: note = a, c, u, g, unknown, or other
  misc_difference 216: note = a, c, u, g, unknown, or other
  misc_difference 217: note = a, c, u, g, unknown, or other
  misc_difference 226: note = a, c, u, g, unknown, or other
  misc_difference 228: note = a, c, u, g, unknown, or other
  misc_difference 229: note = a, c, u, g, unknown, or other
tgtatratrnnnnnannnrnnannnnnnyayaynytycttyynnnnnnnnnnynrtrntataatnnayyyrrryactgtggacttttnatnntnnyytrtagynyygactaytynrnggagtgtattgccrcnryyttatytnaanyrtttatagytggatrngycyyngarynytyatntcnnncaagnytaygrngataannnynngtgganrnnacagtrtynrnn

SEQ ID NO: 795462 - RNA, 239 nt, unidentified
  source 1..239: mol_type = unassigned RNA; note = ISSer1
  misc_difference 1: note = a, c, u, g, unknown, or other
  misc_difference 2: note = a, c, u, g, unknown, or other
  misc_difference 3: note = a, c, u, g, unknown, or other
  misc_difference 4: note = a, c, u, g, unknown, or other
  misc_difference 14: note = a, c, u, g, unknown, or other
  misc_difference 19: note = a, c, u, g, unknown, or other
  misc_difference 28: note = a, c, u, g, unknown, or other
  misc_difference 29: note = a, c, u, g, unknown, or other
  misc_difference 30: note = a, c, u, g, unknown, or other
  misc_difference 31: note = a, c, u, g, unknown, or other
  misc_difference 32: note = a, c, u, g, unknown, or other
  misc_difference 33: note = a, c, u, g, unknown, or other
  misc_difference 34: note = a, c, u, g, unknown, or other
  misc_difference 38: note = a, c, u, g, unknown, or other
  misc_difference 39: note = a, c, u, g, unknown, or other
  misc_difference 40: note = a, c, u, g, unknown, or other
  misc_difference 41: note = a, c, u, g, unknown, or other
  misc_difference 65: note = a, c, u, g, unknown, or other
  misc_difference 66: note = a, c, u, g, unknown, or other
  misc_difference 67: note = a, c, u, g, unknown, or other
  misc_difference 68: note = a, c, u, g, unknown, or other
  misc_difference 69: note = a, c, u, g, unknown, or other
  misc_difference 74: note = a, c, u, g, unknown, or other
  misc_difference 79: note = a, c, u, g, unknown, or other
  misc_difference 80: note = a, c, u, g, unknown, or other
  misc_difference 81: note = a, c, u, g, unknown, or other
  misc_difference 82: note = a, c, u, g, unknown, or other
  misc_difference 83: note = a, c, u, g, unknown, or other
  misc_difference 99: note = a, c, u, g, unknown, or other
  misc_difference 124: note = a, c, u, g, unknown, or other
  misc_difference 125: note = a, c, u, g, unknown, or other
  misc_difference 143: note = a, c, u, g, unknown, or other
  misc_difference 151: note = a, c, u, g, unknown, or other
  misc_difference 152: note = a, c, u, g, unknown, or other
  misc_difference 153: note = a, c, u, g, unknown, or other
  misc_difference 154: note = a, c, u, g, unknown, or other
  misc_difference 166: note = a, c, u, g, unknown, or other
  misc_difference 178: note = a, c, u, g, unknown, or other
  misc_difference 186: note = a, c, u, g, unknown, or other
  misc_difference 187: note = a, c, u, g, unknown, or other
  misc_difference 196: note = a, c, u, g, unknown, or other
  misc_difference 201: note = a, c, u, g, unknown, or other
  misc_difference 209: note = a, c, u, g, unknown, or other
  misc_difference 210: note = a, c, u, g, unknown, or other
  misc_difference 211: note = a, c, u, g, unknown, or other
  misc_difference 212: note = a, c, u, g, unknown, or other
  misc_difference 213: note = a, c, u, g, unknown, or other
  misc_difference 214: note = a, c, u, g, unknown, or other
  misc_difference 215: note = a, c, u, g, unknown, or other
  misc_difference 216: note = a, c, u, g, unknown, or other
  misc_difference 217: note = a, c, u, g, unknown, or other
  misc_difference 219: note = a, c, u, g, unknown, or other
  misc_difference 220: note = a, c, u, g, unknown, or other
  misc_difference 221: note = a, c, u, g, unknown, or other
  misc_difference 222: note = a, c, u, g, unknown, or other
  misc_difference 225: note = a, c, u, g, unknown, or other
  misc_difference 228: note = a, c, u, g, unknown, or other
  misc_difference 229: note = a, c, u, g, unknown, or other
  misc_difference 230: note = a, c, u, g, unknown, or other
  misc_difference 231: note = a, c, u, g, unknown, or other
  misc_difference 232: note = a, c, u, g, unknown, or other
  misc_difference 233: note = a, c, u, g, unknown, or other
  misc_difference 234: note = a, c, u, g, unknown, or other
  misc_difference 235: note = a, c, u, g, unknown, or other
  misc_difference 238: note = a, c, u, g, unknown, or other
nnnncccgttaccntyyynryrgyyyynnnnnnnrgrnnnnyggycrcyrggyyyggyatgactnnnnnccccngtcgnnnnnatgatccggggggtgntgtcrccgggycyggyggcryygrnngaccgctgatagggrcanggccrcynnnnrggyrggtctcntcgtaacgtggntgccggcnnycgrygccngayyngygrccrnnnnnnnnnrnnnnrrnrrnnnnnnnnrynr

SEQ ID NO: 795463 - RNA, 177 nt, unidentified
  source 1..177: mol_type = unassigned RNA; note = ISMno7
  misc_difference 1: note = a, c, u, g, unknown, or other
  misc_difference 2: note = a, c, u, g, unknown, or other
  misc_difference 3: note = a, c, u, g, unknown, or other
  misc_difference 4: note = a, c, u, g, unknown, or other
  misc_difference 10: note = a, c, u, g, unknown, or other
  misc_difference 11: note = a, c, u, g, unknown, or other
  misc_difference 13: note = a, c, u, g, unknown, or other
  misc_difference 14: note = a, c, u, g, unknown, or other
  misc_difference 15: note = a, c, u, g, unknown, or other
  misc_difference 16: note = a, c, u, g, unknown, or other
  misc_difference 17: note = a, c, u, g, unknown, or other
  misc_difference 18: note = a, c, u, g, unknown, or other
  misc_difference 20: note = a, c, u, g, unknown, or other
  misc_difference 22: note = a, c, u, g, unknown, or other
  misc_difference 27: note = a, c, u, g, unknown, or other
  misc_difference 29: note = a, c, u, g, unknown, or other
  misc_difference 30: note = a, c, u, g, unknown, or other
  misc_difference 31: note = a, c, u, g, unknown, or other
  misc_difference 35: note = a, c, u, g, unknown, or other
  misc_difference 42: note = a, c, u, g, unknown, or other
  misc_difference 48: note = a, c, u, g, unknown, or other
  misc_difference 52: note = a, c, u, g, unknown, or other
  misc_difference 53: note = a, c, u, g, unknown, or other
  misc_difference 54: note = a, c, u, g, unknown, or other
  misc_difference 55: note = a, c, u, g, unknown, or other
  misc_difference 56: note = a, c, u, g, unknown, or other
  misc_difference 57: note = a, c, u, g, unknown, or other
  misc_difference 61: note = a, c, u, g, unknown, or other
  misc_difference 64: note = a, c, u, g, unknown, or other
  misc_difference 66: note = a, c, u, g, unknown, or other
  misc_difference 67: note = a, c, u, g, unknown, or other
  misc_difference 68: note = a, c, u, g, unknown, or other
  misc_difference 69: note = a, c, u, g, unknown, or other
  misc_difference 73: note = a, c, u, g, unknown, or other
  misc_difference 78: note = a, c, u, g, unknown, or other
  misc_difference 79: note = a, c, u, g, unknown, or other
  misc_difference 80: note = a, c, u, g, unknown, or other
  misc_difference 81: note = a, c, u, g, unknown, or other
  misc_difference 86: note = a, c, u, g, unknown, or other
  misc_difference 96: note = a, c, u, g, unknown, or other
  misc_difference 103: note = a, c, u, g, unknown, or other
  misc_difference 104: note = a, c, u, g, unknown, or other
  misc_difference 105: note = a, c, u, g, unknown, or other
  misc_difference 108: note = a, c, u, g, unknown, or other
  misc_difference 109: note = a, c, u, g, unknown, or other
  misc_difference 110: note = a, c, u, g, unknown, or other
  misc_difference 111: note = a, c, u, g, unknown, or other
  misc_difference 112: note = a, c, u, g, unknown, or other
  misc_difference 113: note = a, c, u, g, unknown, or other
  misc_difference 114: note = a, c, u, g, unknown, or other
  misc_difference 131: note = a, c, u, g, unknown, or other
  misc_difference 138: note = a, c, u, g, unknown, or other
  misc_difference 139: note = a, c, u, g, unknown, or other
  misc_difference 140: note = a, c, u, g, unknown, or other
  misc_difference 166: note = a, c, u, g, unknown, or other
  misc_difference 172: note = a, c, u, g, unknown, or other
  misc_difference 173: note = a, c, u, g, unknown, or other
  misc_difference 175: note = a, c, u, g, unknown, or other
  misc_difference 176: note = a, c, u, g, unknown, or other
  misc_difference 177: note = a, c, u, g, unknown, or other
nnnnygycrnnynnnnnnrnrnyggynrnnnyrrngryggrnggragnccgnnnnnnccynggnynnnnragnccgynnnngagcnyggygcyccnyccryynnnyynnnnnnnarcccgaacagtcgcyngggccgnnncgagcccgcatyygcaaggaygggynatggannrnnn

SEQ ID NO: 795464 - RNA, 230 nt, unidentified
  source 1..230: mol_type = unassigned RNA; note = ISPath1
  misc_difference 1: note = a, c, u, g, unknown, or other
  misc_difference 2: note = a, c, u, g, unknown, or other
  misc_difference 3: note = a, c, u, g, unknown, or other
  misc_difference 4: note = a, c, u, g, unknown, or other
  misc_difference 5: note = a, c, u, g, unknown, or other
  misc_difference 10: note = a, c, u, g, unknown, or other
  misc_difference 13: note = a, c, u, g, unknown, or other
  misc_difference 24: note = a, c, u, g, unknown, or other
  misc_difference 25: note = a, c, u, g, unknown, or other
  misc_difference 31: note = a, c, u, g, unknown, or other
  misc_difference 33: note = a, c, u, g, unknown, or other
  misc_difference 35: note = a, c, u, g, unknown, or other
  misc_difference 51: note = a, c, u, g, unknown, or other
  misc_difference 54: note = a, c, u, g, unknown, or other
  misc_difference 67: note = a, c, u, g, unknown, or other
  misc_difference 69: note = a, c, u, g, unknown, or other
  misc_difference 75: note = a, c, u, g, unknown, or other
  misc_difference 76: note = a, c, u, g, unknown, or other
  misc_difference 77: note = a, c, u, g, unknown, or other
  misc_difference 78: note = a, c, u, g, unknown, or other
  misc_difference 79: note = a, c, u, g, unknown, or other
  misc_difference 83: note = a, c, u, g, unknown, or other
  misc_difference 91: note = a, c, u, g, unknown, or other
  misc_difference 99: note = a, c, u, g, unknown, or other
  misc_difference 100: note = a, c, u, g, unknown, or other
  misc_difference 101: note = a, c, u, g, unknown, or other
  misc_difference 102: note = a, c, u, g, unknown, or other
  misc_difference 103: note = a, c, u, g, unknown, or other
  misc_difference 104: note = a, c, u, g, unknown, or other
  misc_difference 109: note = a, c, u, g, unknown, or other
  misc_difference 127: note = a, c, u, g, unknown, or other
  misc_difference 147: note = a, c, u, g, unknown, or other
  misc_difference 148: note = a, c, u, g, unknown, or other
  misc_difference 149: note = a, c, u, g, unknown, or other
  misc_difference 150: note = a, c, u, g, unknown, or other
  misc_difference 151: note = a, c, u, g, unknown, or other
  misc_difference 156: note = a, c, u, g, unknown, or other
  misc_difference 157: note = a, c, u, g, unknown, or other
  misc_difference 158: note = a, c, u, g, unknown, or other
  misc_difference 159: note = a, c, u, g, unknown, or other
  misc_difference 160: note = a, c, u, g, unknown, or other
  misc_difference 178: note = a, c, u, g, unknown, or other
  misc_difference 186: note = a, c, u, g, unknown, or other
  misc_difference 187: note = a, c, u, g, unknown, or other
  misc_difference 188: note = a, c, u, g, unknown, or other
  misc_difference 189: note = a, c, u, g, unknown, or other
  misc_difference 190: note = a, c, u, g, unknown, or other
  misc_difference 191: note = a, c, u, g, unknown, or other
  misc_difference 192: note = a, c, u, g, unknown, or other
  misc_difference 193: note = a, c, u, g, unknown, or other
  misc_difference 198: note = a, c, u, g, unknown, or other
  misc_difference 199: note = a, c, u, g, unknown, or other
  misc_difference 200: note = a, c, u, g, unknown, or other
  misc_difference 201: note = a, c, u, g, unknown, or other
  misc_difference 205: note = a, c, u, g, unknown, or other
  misc_difference 207: note = a, c, u, g, unknown, or other
  misc_difference 208: note = a, c, u, g, unknown, or other
  misc_difference 223: note = a, c, u, g, unknown, or other
  misc_difference 224: note = a, c, u, g, unknown, or other
nnnnnryyynycnggttttgcgannrcyganrnyngatgacrtraacggcnyancggcctgryrrrnancctgrnnnnnraanyrgcyyynrargcygnnnnnnttttnaggryyrycrggcgcgrnyctcatcgtggcgcggrrrnnnnnyyccnnnnngacgccggatagatttrngcaagccnnnnnnnncrycnnnnrycnrnnttgcaaaaayrgggnngaccat

SEQ ID NO: 795465 - RNA, 209 nt, unidentified
  source 1..209: mol_type = unassigned RNA; note = ISSep2
  misc_difference 10: note = a, c, u, g, unknown, or other
  misc_difference 12: note = a, c, u, g, unknown, or other
  misc_difference 14: note = a, c, u, g, unknown, or other
  misc_difference 20: note = a, c, u, g, unknown, or other
  misc_difference 21: note = a, c, u, g, unknown, or other
  misc_difference 25: note = a, c, u, g, unknown, or other
  misc_difference 26: note = a, c, u, g, unknown, or other
  misc_difference 27: note = a, c, u, g, unknown, or other
  misc_difference 30: note = a, c, u, g, unknown, or other
  misc_difference 31: note = a, c, u, g, unknown, or other
  misc_difference 32: note = a, c, u, g, unknown, or other
  misc_difference 34: note = a, c, u, g, unknown, or other
  misc_difference 36: note = a, c, u, g, unknown, or other
  misc_difference 38: note = a, c, u, g, unknown, or other
  misc_difference 48: note = a, c, u, g, unknown, or other
  misc_difference 65: note = a, c, u, g, unknown, or other
  misc_difference 67: note = a, c, u, g, unknown, or other
  misc_difference 74: note = a, c, u, g, unknown, or other
  misc_difference 75: note = a, c, u, g, unknown, or other
  misc_difference 76: note = a, c, u, g, unknown, or other
  misc_difference 78: note = a, c, u, g, unknown, or other
  misc_difference 79: note = a, c, u, g, unknown, or other
  misc_difference 83: note = a, c, u, g, unknown, or other
  misc_difference 84: note = a, c, u, g, unknown, or other
  misc_difference 90: note = a, c, u, g, unknown, or other
  misc_difference 91: note = a, c, u, g, unknown, or other
  misc_difference 99: note = a, c, u, g, unknown, or other
  misc_difference 101: note = a, c, u, g, unknown, or other
  misc_difference 102: note = a, c, u, g, unknown, or other
  misc_difference 103: note = a, c, u, g, unknown, or other
  misc_difference 104: note = a, c, u, g, unknown, or other
  misc_difference 108: note = a, c, u, g, unknown, or other
  misc_difference 109: note = a, c, u, g, unknown, or other
  misc_difference 114: note = a, c, u, g, unknown, or other
  misc_difference 115: note = a, c, u, g, unknown, or other
  misc_difference 117: note = a, c, u, g, unknown, or other
  misc_difference 123: note = a, c, u, g, unknown, or other
  misc_difference 124: note = a, c, u, g, unknown, or other
  misc_difference 126: note = a, c, u, g, unknown, or other
  misc_difference 129: note = a, c, u, g, unknown, or other
  misc_difference 131: note = a, c, u, g, unknown, or other
  misc_difference 132: note = a, c, u, g, unknown, or other
  misc_difference 138: note = a, c, u, g, unknown, or other
  misc_difference 140: note = a, c, u, g, unknown, or other
  misc_difference 143: note = a, c, u, g, unknown, or other
  misc_difference 144: note = a, c, u, g, unknown, or other
  misc_difference 156: note = a, c, u, g, unknown, or other
  misc_difference 159: note = a, c, u, g, unknown, or other
  misc_difference 161: note = a, c, u, g, unknown, or other
  misc_difference 165: note = a, c, u, g, unknown, or other
  misc_difference 172: note = a, c, u, g, unknown, or other
  misc_difference 173: note = a, c, u, g, unknown, or other
  misc_difference 180: note = a, c, u, g, unknown, or other
  misc_difference 181: note = a, c, u, g, unknown, or other
  misc_difference 189: note = a, c, u, g, unknown, or other
  misc_difference 190: note = a, c, u, g, unknown, or other
  misc_difference 192: note = a, c, u, g, unknown, or other
  misc_difference 194: note = a, c, u, g, unknown, or other
  misc_difference 195: note = a, c, u, g, unknown, or other
  misc_difference 196: note = a, c, u, g, unknown, or other
  misc_difference 197: note = a, c, u, g, unknown, or other
  misc_difference 205: note = a, c, u, g, unknown, or other
aagattagtnrnrnrrryynngrcnnnrrnnnynynynrctrtttyyntayagtrrargtgarrnrnarrycgnnnrnnyyynnggryynnraryycgnannnnaaanngryynncnycacynnynttnynnrartyngnttnnagtrtgyyggrncynyngarnycgtgtnnargaaannrrrrtyrnnrnrnnnnrrtrrrgnytty

SEQ ID NO: 795466 - RNA, 211 nt, unidentified
  source 1..211: mol_type = unassigned RNA; note = ISSko1
  misc_difference 3: note = a, c, u, g, unknown, or other
  misc_difference 4: note = a, c, u, g, unknown, or other
  misc_difference 5: note = a, c, u, g, unknown, or other
  misc_difference 6: note = a, c, u, g, unknown, or other
  misc_difference 7: note = a, c, u, g, unknown, or other
  misc_difference 13: note = a, c, u, g, unknown, or other
  misc_difference 14: note = a, c, u, g, unknown, or other
  misc_difference 15: note = a, c, u, g, unknown, or other
  misc_difference 17: note = a, c, u, g, unknown, or other
  misc_difference 18: note = a, c, u, g, unknown, or other
  misc_difference 19: note = a, c, u, g, unknown, or other
  misc_difference 20: note = a, c, u, g, unknown, or other
  misc_difference 21: note = a, c, u, g, unknown, or other
  misc_difference 22: note = a, c, u, g, unknown, or other
  misc_difference 24: note = a, c, u, g, unknown, or other
  misc_difference 25: note = a, c, u, g, unknown, or other
  misc_difference 26: note = a, c, u, g, unknown, or other
  misc_difference 27: note = a, c, u, g, unknown, or other
  misc_difference 29: note = a, c, u, g, unknown, or other
  misc_difference 35: note = a, c, u, g, unknown, or other
  misc_difference 36: note = a, c, u, g, unknown, or other
  misc_difference 38: note = a, c, u, g, unknown, or other
  misc_difference 39: note = a, c, u, g, unknown, or other
  misc_difference 47: note = a, c, u, g, unknown, or other
  misc_difference 50: note = a, c, u, g, unknown, or other
  misc_difference 51: note = a, c, u, g, unknown, or other
  misc_difference 52: note = a, c, u, g, unknown, or other
  misc_difference 56: note = a, c, u, g, unknown, or other
  misc_difference 59: note = a, c, u, g, unknown, or other
  misc_difference 60: note = a, c, u, g, unknown, or other
  misc_difference 72: note = a, c, u, g, unknown, or other
  misc_difference 73: note = a, c, u, g, unknown, or other
  misc_difference 74: note = a, c, u, g, unknown, or other
  misc_difference 75: note = a, c, u, g, unknown, or other
  misc_difference 76: note = a, c, u, g, unknown, or other
  misc_difference 83: note = a, c, u, g, unknown, or other
  misc_difference 92: note = a, c, u, g, unknown, or other
  misc_difference 94: note = a, c, u, g, unknown, or other
  misc_difference 95: note = a, c, u, g, unknown, or other
  misc_difference 97: note = a, c, u, g, unknown, or other
  misc_difference 109: note = a, c, u, g, unknown, or other
  misc_difference 110: note = a, c, u, g, unknown, or other
  misc_difference 113: note = a, c, u, g, unknown, or other
  misc_difference 119: note = a, c, u, g, unknown, or other
  misc_difference 126: note = a, c, u, g, unknown, or other
  misc_difference 133: note = a, c, u, g, unknown, or other
  misc_difference 137: note = a, c, u, g, unknown, or other
  misc_difference 138: note = a, c, u, g, unknown, or other
  misc_difference 139: note = a, c, u, g, unknown, or other
  misc_difference 140: note = a, c, u, g, unknown, or other
  misc_difference 141: note = a, c, u, g, unknown, or other
  misc_difference 142: note = a, c, u, g, unknown, or other
  misc_difference 143: note = a, c, u, g, unknown, or other
  misc_difference 144: note = a, c, u, g, unknown, or other
  misc_difference 145: note = a, c, u, g, unknown, or other
  misc_difference 146: note = a, c, u, g, unknown, or other
  misc_difference 151: note = a, c, u, g, unknown, or other
  misc_difference 152: note = a, c, u, g, unknown, or other
  misc_difference 153: note = a, c, u, g, unknown, or other
  misc_difference 154: note = a, c, u, g, unknown, or other
  misc_difference 155: note = a, c, u, g, unknown, or other
  misc_difference 164: note = a, c, u, g, unknown, or other
  misc_difference 179: note = a, c, u, g, unknown, or other
  misc_difference 180: note = a, c, u, g, unknown, or other
  misc_difference 181: note = a, c, u, g, unknown, or other
  misc_difference 185: note = a, c, u, g, unknown, or other
  misc_difference 186: note = a, c, u, g, unknown, or other
  misc_difference 188: note = a, c, u, g, unknown, or other
  misc_difference 190: note = a, c, u, g, unknown, or other
  misc_difference 193: note = a, c, u, g, unknown, or other
  misc_difference 194: note = a, c, u, g, unknown, or other
  misc_difference 196: note = a, c, u, g, unknown, or other
  misc_difference 197: note = a, c, u, g, unknown, or other
  misc_difference 198: note = a, c, u, g, unknown, or other
  misc_difference 199: note = a, c, u, g, unknown, or other
  misc_difference 201: note = a, c, u, g, unknown, or other
  misc_difference 202: note = a, c, u, g, unknown, or other
  misc_difference 204: note = a, c, u, g, unknown, or other
  misc_difference 205: note = a, c, u, g, unknown, or other
  misc_difference 206: note = a, c, u, g, unknown, or other
  misc_difference 207: note = a, c, u, g, unknown, or other
  misc_difference 208: note = a, c, u, g, unknown, or other
  misc_difference 209: note = a, c, u, g, unknown, or other
yynnnnnrytgcnnnrnnnnnnynnnntnatgrcnnannrgrtcrgnccnnnryrnrrnnargccgataacnnnnntggccynyraggccgnynnancgattggcyycnnrynygcgrntyycatnatggccngrrnnnnnnnnnnyycannnnnaggycgranayacgrytgcarycnnnyyynnynynycnnynnnnrnnynnnnnnyr

SEQ ID NO: 795467 - RNA, 226 nt, unidentified
  source 1..226: mol_type = unassigned RNA; note = ISVisp6
  misc_difference 2: note = a, c, u, g, unknown, or other
  misc_difference 3: note = a, c, u, g, unknown, or other
  misc_difference 4: note = a, c, u, g, unknown, or other
  misc_difference 5: note = a, c, u, g, unknown, or other
  misc_difference 6: note = a, c, u, g, unknown, or other
  misc_difference 12: note = a, c, u, g, unknown, or other
  misc_difference 13: note = a, c, u, g, unknown, or other
  misc_difference 14: note = a, c, u, g, unknown, or other
  misc_difference 15: note = a, c, u, g, unknown, or other
  misc_difference 16: note = a, c, u, g, unknown, or other
  misc_difference 17: note = a, c, u, g, unknown, or other
  misc_difference 24: note = a, c, u, g, unknown, or other
  misc_difference 27: note = a, c, u, g, unknown, or other
  misc_difference 28: note = a, c, u, g, unknown, or other
  misc_difference 30: note = a, c, u, g, unknown, or other
  misc_difference 31: note = a, c, u, g, unknown, or other
  misc_difference 37: note = a, c, u, g, unknown, or other
  misc_difference 41: note = a, c, u, g, unknown, or other
  misc_difference 42: note = a, c, u, g, unknown, or other
  misc_difference 54: note = a, c, u, g, unknown, or other
  misc_difference 56: note = a, c, u, g, unknown, or other
  misc_difference 57: note = a, c, u, g, unknown, or other
  misc_difference 58: note = a, c, u, g, unknown, or other
  misc_difference 61: note = a, c, u, g, unknown, or other
  misc_difference 69: note = a, c, u, g, unknown, or other
  misc_difference 71: note = a, c, u, g, unknown, or other
  misc_difference 73: note = a, c, u, g, unknown, or other
  misc_difference 74: note = a, c, u, g, unknown, or other
  misc_difference 75: note = a, c, u, g, unknown, or other
  misc_difference 76: note = a, c, u, g, unknown, or other
  misc_difference 77: note = a, c, u, g, unknown, or other
  misc_difference 78: note = a, c, u, g, unknown, or other
  misc_difference 79: note = a, c, u, g, unknown, or other
  misc_difference 83: note = a, c, u, g, unknown, or other
  misc_difference 84: note = a, c, u, g, unknown, or other
  misc_difference 85: note = a, c, u, g, unknown, or other
  misc_difference 86: note = a, c, u, g, unknown, or other
  misc_difference 87: note = a, c, u, g, unknown, or other
  misc_difference 88: note = a, c, u, g, unknown, or other
  misc_difference 91: note = a, c, u, g, unknown, or other
  misc_difference 96: note = a, c, u, g, unknown, or other
  misc_difference 98: note = a, c, u, g, unknown, or other
  misc_difference 110: note = a, c, u, g, unknown, or other
  misc_difference 111: note = a, c, u, g, unknown, or other
  misc_difference 113: note = a, c, u, g, unknown, or other
  misc_difference 114: note = a, c, u, g, unknown, or other
  misc_difference 117: note = a, c, u, g, unknown, or other
  misc_difference 122: note = a, c, u, g, unknown, or other
  misc_difference 123: note = a, c, u, g, unknown, or other
  misc_difference 125: note = a, c, u, g, unknown, or other
  misc_difference 126: note = a, c, u, g, unknown, or other
  misc_difference 133: note = a, c, u, g, unknown, or other
  misc_difference 138: note = a, c, u, g, unknown, or other
  misc_difference 143: note = a, c, u, g, unknown, or other
  misc_difference 144: note = a, c, u, g, unknown, or other
  misc_difference 145: note = a, c, u, g, unknown, or other
  misc_difference 146: note = a, c, u, g, unknown, or other
  misc_difference 147: note = a, c, u, g, unknown, or other
  misc_difference 148: note = a, c, u, g, unknown, or other
  misc_difference 152: note = a, c, u, g, unknown, or other
  misc_difference 155: note = a, c, u, g, unknown, or other
  misc_difference 156: note = a, c, u, g, unknown, or other
  misc_difference 158: note = a, c, u, g, unknown, or other
  misc_difference 166: note = a, c, u, g, unknown, or other
  misc_difference 173: note = a, c, u, g, unknown, or other
  misc_difference 174: note = a, c, u, g, unknown, or other
  misc_difference 183: note = a, c, u, g, unknown, or other
  misc_difference 186: note = a, c, u, g, unknown, or other
  misc_difference 189: note = a, c, u, g, unknown, or other
  misc_difference 190: note = a, c, u, g, unknown, or other
  misc_difference 191: note = a, c, u, g, unknown, or other
  misc_difference 192: note = a, c, u, g, unknown, or other
  misc_difference 193: note = a, c, u, g, unknown, or other
  misc_difference 195: note = a, c, u, g, unknown, or other
  misc_difference 197: note = a, c, u, g, unknown, or other
  misc_difference 198: note = a, c, u, g, unknown, or other
  misc_difference 199: note = a, c, u, g, unknown, or other
  misc_difference 200: note = a, c, u, g, unknown, or other
  misc_difference 203: note = a, c, u, g, unknown, or other
  misc_difference 204: note = a, c, u, g, unknown, or other
  misc_difference 205: note = a, c, u, g, unknown, or other
  misc_difference 206: note = a, c, u, g, unknown, or other
  misc_difference 207: note = a, c, u, g, unknown, or other
  misc_difference 208: note = a, c, u, g, unknown, or other
  misc_difference 214: note = a, c, u, g, unknown, or other
  misc_difference 215: note = a, c, u, g, unknown, or other
  misc_difference 216: note = a, c, u, g, unknown, or other
  misc_difference 217: note = a, c, u, g, unknown, or other
rnnnnnyyrccnnnnnnytgcrrnrrnnrnngatgrnrrrnnggtyrgaccgrngnnnrrnrarcctgntnannnnnnnggynnnnnnranrccgnynaacgaatgaggnnynnrynygcgnnynnycatcrnggycnrrgcnnnnnngcynaynnrnagrccgrntrtarrnnygcagtcynrynyynnnnnynrnnnnyrnnnnnnyygcrnnnnggggragtc

SEQ ID NO: 795468 - RNA, 229 nt, unidentified
  source 1..229: mol_type = unassigned RNA; note = ISPsy7
  misc_difference 1: note = a, c, u, g, unknown, or other
  misc_difference 2: note = a, c, u, g, unknown, or other
  misc_difference 3: note = a, c, u, g, unknown, or other
  misc_difference 5: note = a, c, u, g, unknown, or other
  misc_difference 6: note = a, c, u, g, unknown, or other
  misc_difference 9: note = a, c, u, g, unknown, or other
  misc_difference 12: note = a, c, u, g, unknown, or other
  misc_difference 23: note = a, c, u, g, unknown, or other
  misc_difference 24: note = a, c, u, g, unknown, or other
  misc_difference 27: note = a, c, u, g, unknown, or other
  misc_difference 30: note = a, c, u, g, unknown, or other
  misc_difference 32: note = a, c, u, g, unknown, or other
  misc_difference 33: note = a, c, u, g, unknown, or other
  misc_difference 50: note = a, c, u, g, unknown, or other
  misc_difference 53: note = a, c, u, g, unknown, or other
  misc_difference 66: note = a, c, u, g, unknown, or other
  misc_difference 68: note = a, c, u, g, unknown, or other
  misc_difference 74: note = a, c, u, g, unknown, or other
  misc_difference 75: note = a, c, u, g, unknown, or other
  misc_difference 76: note = a, c, u, g, unknown, or other
  misc_difference 77: note = a, c, u, g, unknown, or other
  misc_difference 78: note = a, c, u, g, unknown, or other
  misc_difference 82: note = a, c, u, g, unknown, or other
  misc_difference 89: note = a, c, u, g, unknown, or other
  misc_difference 90: note = a, c, u, g, unknown, or other
  misc_difference 98: note = a, c, u, g, unknown, or other
  misc_difference 99: note = a, c, u, g, unknown, or other
  misc_difference 100: note = a, c, u, g, unknown, or other
  misc_difference 101: note = a, c, u, g, unknown, or other
  misc_difference 102: note = a, c, u, g, unknown, or other
  misc_difference 103: note = a, c, u, g, unknown, or other
  misc_difference 108: note = a, c, u, g, unknown, or other
  misc_difference 135: note = a, c, u, g, unknown, or other
  misc_difference 138: note = a, c, u, g, unknown, or other
  misc_difference 139: note = a, c, u, g, unknown, or other
  misc_difference 144: note = a, c, u, g, unknown, or other
  misc_difference 145: note = a, c, u, g, unknown, or other
  misc_difference 146: note = a, c, u, g, unknown, or other
  misc_difference 147: note = a, c, u, g, unknown, or other
  misc_difference 148: note = a, c, u, g, unknown, or other
  misc_difference 149: note = a, c, u, g, unknown, or other
  misc_difference 150: note = a, c, u, g, unknown, or other
  misc_difference 151: note = a, c, u, g, unknown, or other
  misc_difference 156: note = a, c, u, g, unknown, or other
  misc_difference 157: note = a, c, u, g, unknown, or other
  misc_difference 158: note = a, c, u, g, unknown, or other
  misc_difference 159: note = a, c, u, g, unknown, or other
  misc_difference 162: note = a, c, u, g, unknown, or other
  misc_difference 163: note = a, c, u, g, unknown, or other
  misc_difference 171: note = a, c, u, g, unknown, or other
  misc_difference 175: note = a, c, u, g, unknown, or other
  misc_difference 177: note = a, c, u, g, unknown, or other
  misc_difference 185: note = a, c, u, g, unknown, or other
  misc_difference 186: note = a, c, u, g, unknown, or other
  misc_difference 187: note = a, c, u, g, unknown, or other
  misc_difference 188: note = a, c, u, g, unknown, or other
  misc_difference 191: note = a, c, u, g, unknown, or other
  misc_difference 192: note = a, c, u, g, unknown, or other
  misc_difference 193: note = a, c, u, g, unknown, or other
  misc_difference 199: note = a, c, u, g, unknown, or other
  misc_difference 200: note = a, c, u, g, unknown, or other
  misc_difference 201: note = a, c, u, g, unknown, or other
  misc_difference 202: note = a, c, u, g, unknown, or other
  misc_difference 207: note = a, c, u, g, unknown, or other
  misc_difference 208: note = a, c, u, g, unknown, or other
  misc_difference 217: note = a, c, u, g, unknown, or other
  misc_difference 218: note = a, c, u, g, unknown, or other
  misc_difference 219: note = a, c, u, g, unknown, or other
  misc_difference 223: note = a, c, u, g, unknown, or other
nnnynncynycngrttttgcgannrynrrnrnnygatgacryraacggcnyancggcctgryrrrnancctgrnnnnnrrrnyrgcyynnrargcygnnnnnnttttnaggryyryyrggygcgrytctcatcrnggnncggrnnnnnnnnyycannnngannccggatanattnrngcaagccnnnnyrnnnyrycrnnnnycrrnnttgcaaaannnrggnygacca

SEQ ID NO: 795469 - RNA, 181 nt, unidentified
  source 1..181: mol_type = unassigned RNA; note = IS1663
  misc_difference 1: note = a, c, u, g, unknown, or other
  misc_difference 2: note = a, c, u, g, unknown, or other
  misc_difference 3: note = a, c, u, g, unknown, or other
  misc_difference 4: note = a, c, u, g, unknown, or other
  misc_difference 5: note = a, c, u, g, unknown, or other
  misc_difference 6: note = a, c, u, g, unknown, or other
  misc_difference 10: note = a, c, u, g, unknown, or other
  misc_difference 20: note = a, c, u, g, unknown, or other
  misc_difference 25: note = a, c, u, g, unknown, or other
  misc_difference 28: note = a, c, u, g, unknown, or other
  misc_difference 29: note = a, c, u, g, unknown, or other
  misc_difference 34: note = a, c, u, g, unknown, or other
  misc_difference 35: note = a, c, u, g, unknown, or other
  misc_difference 39: note = a, c, u, g, unknown, or other
  misc_difference 40: note = a, c, u, g, unknown, or other
  misc_difference 47: note = a, c, u, g, unknown, or other
  misc_difference 48: note = a, c, u, g, unknown, or other
  misc_difference 51: note = a, c, u, g, unknown, or other
  misc_difference 52: note = a, c, u, g, unknown, or other
  misc_difference 53: note = a, c, u, g, unknown, or other
  misc_difference 57: note = a, c, u, g, unknown, or other
  misc_difference 61: note = a, c, u, g, unknown, or other
  misc_difference 62: note = a, c, u, g, unknown, or other
  misc_difference 63: note = a, c, u, g, unknown, or other
  misc_difference 64: note = a, c, u, g, unknown, or other
  misc_difference 65: note = a, c, u, g, unknown, or other
  misc_difference 68: note = a, c, u, g, unknown, or other
  misc_difference 73: note = a, c, u, g, unknown, or other
  misc_difference 74: note = a, c, u, g, unknown, or other
  misc_difference 75: note = a, c, u, g, unknown, or other
  misc_difference 83: note = a, c, u, g, unknown, or other
  misc_difference 92: note = a, c, u, g, unknown, or other
  misc_difference 93: note = a, c, u, g, unknown, or other
  misc_difference 98: note = a, c, u, g, unknown, or other
  misc_difference 99: note = a, c, u, g, unknown, or other
  misc_difference 104: note = a, c, u, g, unknown, or other
  misc_difference 105: note = a, c, u, g, unknown, or other
  misc_difference 110: note = a, c, u, g, unknown, or other
  misc_difference 111: note = a, c, u, g, unknown, or other
  misc_difference 112: note = a, c, u, g, unknown, or other
  misc_difference 113: note = a, c, u, g, unknown, or other
  misc_difference 114: note = a, c, u, g, unknown, or other
  misc_difference 115: note = a, c, u, g, unknown, or other
  misc_difference 130: note = a, c, u, g, unknown, or other
  misc_difference 137: note = a, c, u, g, unknown, or other
  misc_difference 139: note = a, c, u, g, unknown, or other
  misc_difference 140: note = a, c, u, g, unknown, or other
  misc_difference 141: note = a, c, u, g, unknown, or other
  misc_difference 144: note = a, c, u, g, unknown, or other
  misc_difference 153: note = a, c, u, g, unknown, or other
  misc_difference 160: note = a, c, u, g, unknown, or other
  misc_difference 170: note = a, c, u, g, unknown, or other
  misc_difference 172: note = a, c, u, g, unknown, or other
  misc_difference 173: note = a, c, u, g, unknown, or other
  misc_difference 174: note = a, c, u, g, unknown, or other
  misc_difference 178: note = a, c, u, g, unknown, or other
  misc_difference 179: note = a, c, u, g, unknown, or other
  misc_difference 180: note = a, c, u, g, unknown, or other
  misc_difference 181: note = a, c, u, g, unknown, or other
nnnnnnrtrntgrttagctnycrynrynngrrrnnrrgnnagcytgnnyynnncctnarrnnnnnranyytgnnnygyagatnargccyyynnycyynnyyyynnyrycnnnnnnrayactgracggtanccraggncnnngancctgyatgnacaaggnragtgggyrnrnnngrynnnn

SEQ ID NO: 795470 - RNA, 227 nt, unidentified
  source 1..227: mol_type = unassigned RNA; note = ISPa71
  misc_difference 3: note = a, c, u, g, unknown, or other
  misc_difference 4: note = a, c, u, g, unknown, or other
  misc_difference 5: note = a, c, u, g, unknown, or other
  misc_difference 6: note = a, c, u, g, unknown, or other
  misc_difference 7: note = a, c, u, g, unknown, or other
  misc_difference 13: note = a, c, u, g, unknown, or other
  misc_difference 14: note = a, c, u, g, unknown, or other
  misc_difference 15: note = a, c, u, g, unknown, or other
  misc_difference 17: note = a, c, u, g, unknown, or other
  misc_difference 18: note = a, c, u, g, unknown, or other
  misc_difference 19: note = a, c, u, g, unknown, or other
  misc_difference 21: note = a, c, u, g, unknown, or other
  misc_difference 23: note = a, c, u, g, unknown, or other
  misc_difference 24: note = a, c, u, g, unknown, or other
  misc_difference 25: note = a, c, u, g, unknown, or other
  misc_difference 26: note = a, c, u, g, unknown, or other
  misc_difference 28: note = a, c, u, g, unknown, or other
  misc_difference 34: note = a, c, u, g, unknown, or other
  misc_difference 35: note = a, c, u, g, unknown, or other
  misc_difference 37: note = a, c, u, g, unknown, or other
  misc_difference 41: note = a, c, u, g, unknown, or other
  misc_difference 44: note = a, c, u, g, unknown, or other
  misc_difference 46: note = a, c, u, g, unknown, or other
  misc_difference 49: note = a, c, u, g, unknown, or other
  misc_difference 50: note = a, c, u, g, unknown, or other
  misc_difference 51: note = a, c, u, g, unknown, or other
  misc_difference 54: note = a, c, u, g, unknown, or other
  misc_difference 55: note = a, c, u, g, unknown, or other
  misc_difference 58: note = a, c, u, g, unknown, or other
  misc_difference 59: note = a, c, u, g, unknown, or other
  misc_difference 71: note = a, c, u, g, unknown, or other
  misc_difference 72: note = a, c, u, g, unknown, or other
  misc_difference 73: note = a, c, u, g, unknown, or other
  misc_difference 74: note = a, c, u, g, unknown, or other
  misc_difference 75: note = a, c, u, g, unknown, or other
  misc_difference 82: note = a, c, u, g, unknown, or other
  misc_difference 83: note = a, c, u, g, unknown, or other
  misc_difference 91: note = a, c, u, g, unknown, or other
  misc_difference 93: note = a, c, u, g, unknown, or other
  misc_difference 94: note = a, c, u, g, unknown, or other
  misc_difference 95: note = a, c, u, g, unknown, or other
  misc_difference 109: note = a, c, u, g, unknown, or other
  misc_difference 110: note = a, c, u, g, unknown, or other
  misc_difference 113: note = a, c, u, g, unknown, or other
  misc_difference 119: note = a, c, u, g, unknown, or other
  misc_difference 126: note = a, c, u, g, unknown, or other
  misc_difference 133: note = a, c, u, g, unknown, or other
  misc_difference 137: note = a, c, u, g, unknown, or other
  misc_difference 138: note = a, c, u, g, unknown, or other
  misc_difference 139: note = a, c, u, g, unknown, or other
  misc_difference 140: note = a, c, u, g, unknown, or other
  misc_difference 141: note = a, c, u, g, unknown, or other
  misc_difference 142: note = a, c, u, g, unknown, or other
  misc_difference 143: note = a, c, u, g, unknown, or other
  misc_difference 144: note = a, c, u, g, unknown, or other
  misc_difference 145: note = a, c, u, g, unknown, or other
  misc_difference 146: note = a, c, u, g, unknown, or other
  misc_difference 153: note = a, c, u, g, unknown, or other
  misc_difference 154: note = a, c, u, g, unknown, or other
  misc_difference 155: note = a, c, u, g, unknown, or other
  misc_difference 164: note = a, c, u, g, unknown, or other
  misc_difference 180: note = a, c, u, g, unknown, or other
  misc_difference 181: note = a, c, u, g, unknown, or other
  misc_difference 182: note = a, c, u, g, unknown, or other
  misc_difference 184: note = a, c, u, g, unknown, or other
  misc_difference 185: note = a, c, u, g, unknown, or other
  misc_difference 186: note = a, c, u, g, unknown, or other
  misc_difference 187: note = a, c, u, g, unknown, or other
  misc_difference 189: note = a, c, u, g, unknown, or other
  misc_difference 193: note = a, c, u, g, unknown, or other
  misc_difference 194: note = a, c, u, g, unknown, or other
  misc_difference 195: note = a, c, u, g, unknown, or other
  misc_difference 196: note = a, c, u, g, unknown, or other
  misc_difference 197: note = a, c, u, g, unknown, or other
  misc_difference 198: note = a, c, u, g, unknown, or other
  misc_difference 199: note = a, c, u, g, unknown, or other
  misc_difference 200: note = a, c, u, g, unknown, or other
  misc_difference 201: note = a, c, u, g, unknown, or other
  misc_difference 202: note = a, c, u, g, unknown, or other
  misc_difference 203: note = a, c, u, g, unknown, or other
  misc_difference 204: note = a, c, u, g, unknown, or other
  misc_difference 205: note = a, c, u, g, unknown, or other
  misc_difference 206: note = a, c, u, g, unknown, or other
  misc_difference 207: note = a, c, u, g, unknown, or other
  misc_difference 208: note = a, c, u, g, unknown, or other
  misc_difference 210: note = a, c, u, g, unknown, or other
  misc_difference 211: note = a, c, u, g, unknown, or other
  misc_difference 212: note = a, c, u, g, unknown, or other
  misc_difference 213: note = a, c, u, g, unknown, or other
  misc_difference 217: note = a, c, u, g, unknown, or other
  misc_difference 218: note = a, c, u, g, unknown, or other
cynnnnnrytgcnnnrnnnrnynnnntnatgrcnnrncrgnycngnccnnnrynngrnnargccgataacnnnnntggccynnraggccgntnnnarcgattggcyycnnrynygcgrnttycatnatggccnggrnnnnnnnnnnyccayynnnaggccgranayacgrytgcarycrnnncnnnnynyyrnnnnnnnnnnnnnnnnrnnnntygnnrgrggagtc

SEQ ID NO: 795471 - RNA, 229 nt, unidentified
  source 1..229: mol_type = unassigned RNA; note = IS1328
  misc_difference 1: note = a, c, u, g, unknown, or other
  misc_difference 2: note = a, c, u, g, unknown, or other
  misc_difference 3: note = a, c, u, g, unknown, or other
  misc_difference 7: note = a, c, u, g, unknown, or other
  misc_difference 9: note = a, c, u, g, unknown, or other
  misc_difference 13: note = a, c, u, g, unknown, or other
  misc_difference 17: note = a, c, u, g, unknown, or other
  misc_difference 23: note = a, c, u, g, unknown, or other
  misc_difference 24: note = a, c, u, g, unknown, or other
  misc_difference 25: note = a, c, u, g, unknown, or other
  misc_difference 31: note = a, c, u, g, unknown, or other
  misc_difference 32: note = a, c, u, g, unknown, or other
  misc_difference 33: note = a, c, u, g, unknown, or other
  misc_difference 35: note = a, c, u, g, unknown, or other
  misc_difference 40: note = a, c, u, g, unknown, or other
  misc_difference 41: note = a, c, u, g, unknown, or other
  misc_difference 45: note = a, c, u, g, unknown, or other
  misc_difference 46: note = a, c, u, g, unknown, or other
  misc_difference 51: note = a, c, u, g, unknown, or other
  misc_difference 52: note = a, c, u, g, unknown, or other
  misc_difference 53: note = a, c, u, g, unknown, or other
  misc_difference 54: note = a, c, u, g, unknown, or other
  misc_difference 66: note = a, c, u, g, unknown, or other
  misc_difference 67: note = a, c, u, g, unknown, or other
  misc_difference 69: note = a, c, u, g, unknown, or other
  misc_difference 74: note = a, c, u, g, unknown, or other
  misc_difference 75: note = a, c, u, g, unknown, or other
  misc_difference 76: note = a, c, u, g, unknown, or other
  misc_difference 77: note = a, c, u, g, unknown, or other
  misc_difference 78: note = a, c, u, g, unknown, or other
  misc_difference 79: note = a, c, u, g, unknown, or other
  misc_difference 80: note = a, c, u, g, unknown, or other
  misc_difference 81: note = a, c, u, g, unknown, or other
  misc_difference 82: note = a, c, u, g, unknown, or other
  misc_difference 83: note = a, c, u, g, unknown, or other
  misc_difference 88: note = a, c, u, g, unknown, or other
  misc_difference 89: note = a, c, u, g, unknown, or other
  misc_difference 90: note = a, c, u, g, unknown, or other
  misc_difference 92: note = a, c, u, g, unknown, or other
  misc_difference 93: note = a, c, u, g, unknown, or other
  misc_difference 95: note = a, c, u, g, unknown, or other
  misc_difference 100: note = a, c, u, g, unknown, or other
  misc_difference 101: note = a, c, u, g, unknown, or other
  misc_difference 102: note = a, c, u, g, unknown, or other
  misc_difference 103: note = a, c, u, g, unknown, or other
  misc_difference 104: note = a, c, u, g, unknown, or other
  misc_difference 105: note = a, c, u, g, unknown, or other
  misc_difference 106: note = a, c, u, g, unknown, or other
  misc_difference 107: note = a, c, u, g, unknown, or other
  misc_difference 108: note = a, c, u, g, unknown, or other
  misc_difference 110: note = a, c, u, g, unknown, or other
  misc_difference 114: note = a, c, u, g, unknown, or other
  misc_difference 115: note = a, c, u, g, unknown, or other
  misc_difference 127: note = a, c, u, g, unknown, or other
  misc_difference 128: note = a, c, u, g, unknown, or other
  misc_difference 129: note = a, c, u, g, unknown, or other
  misc_difference 130: note = a, c, u, g, unknown, or other
  misc_difference 131: note = a, c, u, g, unknown, or other
  misc_difference 137: note = a, c, u, g, unknown, or other
  misc_difference 140: note = a, c, u, g, unknown, or other
  misc_difference 145: note = a, c, u, g, unknown, or other
  misc_difference 146: note = a, c, u, g, unknown, or other
  misc_difference 147: note = a, c, u, g, unknown, or other
  misc_difference 148: note = a, c, u, g, unknown, or other
  misc_difference 149: note = a, c, u, g, unknown, or other
  misc_difference 150: note = a, c, u, g, unknown, or other
  misc_difference 152: note = a, c, u, g, unknown, or other
  misc_difference 153: note = a, c, u, g, unknown, or other
  misc_difference 155: note = a, c, u, g, unknown, or other
  misc_difference 156: note = a, c, u, g, unknown, or other
  misc_difference 157: note = a, c, u, g, unknown, or other
  misc_difference 158: note = a, c, u, g, unknown, or other
  misc_difference 159: note = a, c, u, g, unknown, or other
  misc_difference 160: note = a, c, u, g, unknown, or other
  misc_difference 161: note = a, c, u, g, unknown, or other
  misc_difference 162: note = a, c, u, g, unknown, or other
  misc_difference 171: note = a, c, u, g, unknown, or other
  misc_difference 175: note = a, c, u, g, unknown, or other
  misc_difference 176: note = a, c, u, g, unknown, or other
  misc_difference 177: note = a, c, u, g, unknown, or other
  misc_difference 178: note = a, c, u, g, unknown, or other
  misc_difference 179: note = a, c, u, g, unknown, or other
  misc_difference 180: note = a, c, u, g, unknown, or other
  misc_difference 181: note = a, c, u, g, unknown, or other
  misc_difference 182: note = a, c, u, g, unknown, or other
  misc_difference 186: note = a, c, u, g, unknown, or other
  misc_difference 187: note = a, c, u, g, unknown, or other
  misc_difference 188: note = a, c, u, g, unknown, or other
  misc_difference 189: note = a, c, u, g, unknown, or other
  misc_difference 190: note = a, c, u, g, unknown, or other
  misc_difference 191: note = a, c, u, g, unknown, or other
  misc_difference 192: note = a, c, u, g, unknown, or other
  misc_difference 193: note = a, c, u, g, unknown, or other
  misc_difference 196: note = a, c, u, g, unknown, or other
  misc_difference 197: note = a, c, u, g, unknown, or other
  misc_difference 198: note = a, c, u, g, unknown, or other
  misc_difference 199: note = a, c, u, g, unknown, or other
  misc_difference 200: note = a, c, u, g, unknown, or other
  misc_difference 206: note = a, c, u, g, unknown, or other
  misc_difference 215: note = a, c, u, g, unknown, or other
  misc_difference 216: note = a, c, u, g, unknown, or other
  misc_difference 217: note = a, c, u, g, unknown, or other
  misc_difference 218: note = a, c, u, g, unknown, or other
  misc_difference 219: note = a, c, u, g, unknown, or other
  misc_difference 221: note = a, c, u, g, unknown, or other
  misc_difference 222: note = a, c, u, g, unknown, or other
  misc_difference 223: note = a, c, u, g, unknown, or other
  misc_difference 224: note = a, c, u, g, unknown, or other
  misc_difference 228: note = a, c, u, g, unknown, or other
  misc_difference 229: note = a, c, u, g, unknown, or other
nnnyyrnynryyngrynttgygnnnrcygrnnnyngrtgnnryrnncrgynnnnyrgccygryrrnnrnyytrnnnnnnnnnnyggcnnnynnrnrcygnnnnnnnnntnrgrnnyrycrgrygcgnnnnnyaycrngrngcrrnnnnnnynncnnnnnnnnygycrgatnrrtnnnnnnnngccnnnnnnnnrynnnnnyyrgyntygcrrrrnnnnnrnnnnccrnn

SEQ ID NO: 795472 - RNA, 180 nt, unidentified
  source 1..180: mol_type = unassigned RNA; note = ISCro4
  misc_difference 1: note = a, c, u, g, unknown, or other
  misc_difference 2: note = a, c, u, g, unknown, or other
  misc_difference 3: note = a, c, u, g, unknown, or other
  misc_difference 4: note = a, c, u, g, unknown, or other
  misc_difference 7: note = a, c, u, g, unknown, or other
  misc_difference 10: note = a, c, u, g, unknown, or other
  misc_difference 14: note = a, c, u, g, unknown, or other
  misc_difference 15: note = a, c, u, g, unknown, or other
  misc_difference 17: note = a, c, u, g, unknown, or other
  misc_difference 19: note = a, c, u, g, unknown, or other
  misc_difference 20: note = a, c, u, g, unknown, or other
  misc_difference 26: note = a, c, u, g, unknown, or other
  misc_difference 27: note = a, c, u, g, unknown, or other
  misc_difference 28: note = a, c, u, g, unknown, or other
  misc_difference 32: note = a, c, u, g, unknown, or other
  misc_difference 34: note = a, c, u, g, unknown, or other
  misc_difference 46: note = a, c, u, g, unknown, or other
  misc_difference 48: note = a, c, u, g, unknown, or other
  misc_difference 49: note = a, c, u, g, unknown, or other
  misc_difference 50: note = a, c, u, g, unknown, or other
  misc_difference 51: note = a, c, u, g, unknown, or other
  misc_difference 60: note = a, c, u, g, unknown, or other
  misc_difference 62: note = a, c, u, g, unknown, or other
  misc_difference 63: note = a, c, u, g, unknown, or other
  misc_difference 71: note = a, c, u, g, unknown, or other
  misc_difference 72: note = a, c, u, g, unknown, or other
  misc_difference 80: note = a, c, u, g, unknown, or other
  misc_difference 81: note = a, c, u, g, unknown, or other
  misc_difference 82: note = a, c, u, g, unknown, or other
  misc_difference 87: note = a, c, u, g, unknown, or other
  misc_difference 91: note = a, c, u, g, unknown, or other
  misc_difference 93: note = a, c, u, g, unknown, or other
  misc_difference 97: note = a, c, u, g, unknown, or other
  misc_difference 102: note = a, c, u, g, unknown, or other
  misc_difference 104: note = a, c, u, g, unknown, or other
  misc_difference 105: note = a, c, u, g, unknown, or other
  misc_difference 106: note = a, c, u, g, unknown, or other
  misc_difference 107: note = a, c, u, g, unknown, or other
  misc_difference 109: note = a, c, u, g, unknown, or other
  misc_difference 138: note = a, c, u, g, unknown, or other
  misc_difference 144: note = a, c, u, g, unknown, or other
  misc_difference 155: note = a, c, u, g, unknown, or other
  misc_difference 163: note = a, c, u, g, unknown, or other
  misc_difference 171: note = a, c, u, g, unknown, or other
  misc_difference 176: note = a, c, u, g, unknown, or other
  misc_difference 177: note = a, c, u, g, unknown, or other
  misc_difference 178: note = a, c, u, g, unknown, or other
  misc_difference 179: note = a, c, u, g, unknown, or other
  misc_difference 180: note = a, c, u, g, unknown, or other
nnnnyrnyynrrrnngnynnyyyrrnnngrrnrnyyggaygccgynynnnncctyrgrynynnaryyygynnygtagatnnnygcrncrgnynyycnyyyynynnnnrnaratcgracagtatcttyggcccggyyynrccgrnagccygcattnacaaggtngatyryrnragrnnnnn

SEQ ID NO: 795473 - RNA, 197 nt, unidentified
  source 1..197: mol_type = unassigned RNA; note = ISVsp10
  misc_difference 1: note = a, c, u, g, unknown, or other
  misc_difference 12: note = a, c, u, g, unknown, or other
  misc_difference 13: note = a, c, u, g, unknown, or other
  misc_difference 14: note = a, c, u, g, unknown, or other
  misc_difference 15: note = a, c, u, g, unknown, or other
  misc_difference 25: note = a, c, u, g, unknown, or other
  misc_difference 26: note = a, c, u, g, unknown, or other
  misc_difference 27: note = a, c, u, g, unknown, or other
  misc_difference 30: note = a, c, u, g, unknown, or other
  misc_difference 31: note = a, c, u, g, unknown, or other
  misc_difference 32: note = a, c, u, g, unknown, or other
  misc_difference 38: note = a, c, u, g, unknown, or other
  misc_difference 40: note = a, c, u, g, unknown, or other
  misc_difference 41: note = a, c, u, g, unknown, or other
  misc_difference 42: note = a, c, u, g, unknown, or other
  misc_difference 43: note = a, c, u, g, unknown, or other
  misc_difference 44: note = a, c, u, g, unknown, or other
  misc_difference 45: note = a, c, u, g, unknown, or other
  misc_difference 46: note = a, c, u, g, unknown, or other
  misc_difference 47: note = a, c, u, g, unknown, or other
  misc_difference 48: note = a, c, u, g, unknown, or other
  misc_difference 54: note = a, c, u, g, unknown, or other
  misc_difference 56: note = a, c, u, g, unknown, or other
  misc_difference 57: note = a, c, u, g, unknown, or other
  misc_difference 58: note = a, c, u, g, unknown, or other
  misc_difference 59: note = a, c, u, g, unknown, or other
  misc_difference 73: note = a, c, u, g, unknown, or other
  misc_difference 76: note = a, c, u, g, unknown, or other
  misc_difference 77: note = a, c, u, g, unknown, or other
  misc_difference 78: note = a, c, u, g, unknown, or other
  misc_difference 84: note = a, c, u, g, unknown, or other
  misc_difference 87: note = a, c, u, g, unknown, or other
  misc_difference 89: note = a, c, u, g, unknown, or other
  misc_difference 90: note = a, c, u, g, unknown, or other
  misc_difference 91: note = a, c, u, g, unknown, or other
  misc_difference 92: note = a, c, u, g, unknown, or other
  misc_difference 93: note = a, c, u, g, unknown, or other
  misc_difference 95: note = a, c, u, g, unknown, or other
  misc_difference 99: note = a, c, u, g, unknown, or other
  misc_difference 102: note = a, c, u, g, unknown, or other
  misc_difference 108: note = a, c, u, g, unknown, or other
  misc_difference 109: note = a, c, u, g, unknown, or other
  misc_difference 110: note = a, c, u, g, unknown, or other
  misc_difference 111: note = a, c, u, g, unknown, or other
  misc_difference 117: note = a, c, u, g, unknown, or other
  misc_difference 118: note = a, c, u, g, unknown, or other
  misc_difference 119: note = a, c, u, g, unknown, or other
  misc_difference 120: note = a, c, u, g, unknown, or other
  misc_difference 121: note = a, c, u, g, unknown, or other
  misc_difference 122: note = a, c, u, g, unknown, or other
  misc_difference 123: note = a, c, u, g, unknown, or other
  misc_difference 124: note = a, c, u, g, unknown, or other
  misc_difference 125: note = a, c, u, g, unknown, or other
  misc_difference 126: note = a, c, u, g, unknown, or other
  misc_difference 127: note = a, c, u, g, unknown, or other
  misc_difference 128: note = a, c, u, g, unknown, or other
  misc_difference 129: note = a, c, u, g, unknown, or other
  misc_difference 142: note = a, c, u, g, unknown, or other
  misc_difference 145: note = a, c, u, g, unknown, or other
  misc_difference 146: note = a, c, u, g, unknown, or other
  misc_difference 154: note = a, c, u, g, unknown, or other
  misc_difference 155: note = a, c, u, g, unknown, or other
  misc_difference 156: note = a, c, u, g, unknown, or other
  misc_difference 157: note = a, c, u, g, unknown, or other
  misc_difference 159: note = a, c, u, g, unknown, or other
  misc_difference 160: note = a, c, u, g, unknown, or other
  misc_difference 161: note = a, c, u, g, unknown, or other
  misc_difference 162: note = a, c, u, g, unknown, or other
  misc_difference 163: note = a, c, u, g, unknown, or other
  misc_difference 164: note = a, c, u, g, unknown, or other
  misc_difference 166: note = a, c, u, g, unknown, or other
  misc_difference 167: note = a, c, u, g, unknown, or other
  misc_difference 170: note = a, c, u, g, unknown, or other
  misc_difference 173: note = a, c, u, g, unknown, or other
  misc_difference 174: note = a, c, u, g, unknown, or other
  misc_difference 175: note = a, c, u, g, unknown, or other
  misc_difference 176: note = a, c, u, g, unknown, or other
  misc_difference 178: note = a, c, u, g, unknown, or other
  misc_difference 181: note = a, c, u, g, unknown, or other
  misc_difference 186: note = a, c, u, g, unknown, or other
  misc_difference 196: note = a, c, u, g, unknown, or other
  misc_difference 197: note = a, c, u, g, unknown, or other
nytttggrrcgnnnngyrygyycgnnnyynnnyctgrnynnnnnnnnnryycgnynnnntagattgrrcyrcnycnnngytycncyncnnnnnrnyygnatnrrycannnngyrcynnnnnnnnnnnnnrygyrcggatagnagnnyrrrcygnnnnrnnnnnncnnygnrynnnngnrgnrgarncgyyycrrrnn

SEQ ID NO: 795474 - RNA, 168 nt, unidentified
  source 1..168: mol_type = unassigned RNA; note = IS492
  misc_difference 1: note = a, c, u, g, unknown, or other
  misc_difference 2: note = a, c, u, g, unknown, or other
  misc_difference 3: note = a, c, u, g, unknown, or other
  misc_difference 4: note = a, c, u, g, unknown, or other
  misc_difference 5: note = a, c, u, g, unknown, or other
  misc_difference 13: note = a, c, u, g, unknown, or other
  misc_difference 14: note = a, c, u, g, unknown, or other
  misc_difference 24: note = a, c, u, g, unknown, or other
  misc_difference 25: note = a, c, u, g, unknown, or other
  misc_difference 33: note = a, c, u, g, unknown, or other
  misc_difference 36: note = a, c, u, g, unknown, or other
  misc_difference 44: note = a, c, u, g, unknown, or other
  misc_difference 46: note = a, c, u, g, unknown, or other
  misc_difference 47: note = a, c, u, g, unknown, or other
  misc_difference 49: note = a, c, u, g, unknown, or other
  misc_difference 51: note = a, c, u, g, unknown, or other
  misc_difference 64: note = a, c, u, g, unknown, or other
  misc_difference 66: note = a, c, u, g, unknown, or other
  misc_difference 67: note = a, c, u, g, unknown, or other
  misc_difference 68: note = a, c, u, g, unknown, or other
  misc_difference 69: note = a, c, u, g, unknown, or other
  misc_difference 70: note = a, c, u, g, unknown, or other
  misc_difference 71: note = a, c, u, g, unknown, or other
  misc_difference 72: note = a, c, u, g, unknown, or other
  misc_difference 73: note = a, c, u, g, unknown, or other
  misc_difference 82: note = a, c, u, g, unknown, or other
  misc_difference 83: note = a, c, u, g, unknown, or other
  misc_difference 95: note = a, c, u, g, unknown, or other
  misc_difference 103: note = a, c, u, g, unknown, or other
  misc_difference 105: note = a, c, u, g, unknown, or other
  misc_difference 116: note = a, c, u, g, unknown, or other
  misc_difference 117: note = a, c, u, g, unknown, or other
  misc_difference 131: note = a, c, u, g, unknown, or other
  misc_difference 132: note = a, c, u, g, unknown, or other
  misc_difference 133: note = a, c, u, g, unknown, or other
  misc_difference 147: note = a, c, u, g, unknown, or other
  misc_difference 149: note = a, c, u, g, unknown, or other
  misc_difference 164: note = a, c, u, g, unknown, or other
  misc_difference 167: note = a, c, u, g, unknown, or other
  misc_difference 168: note = a, c, u, g, unknown, or other
nnnnnygggtaanntgagrcccannctttrgyngcnrcyraagnynnynyntryrgyagytcgnynnnnnnnnggytcctynnyygagagaccgntaacaagnrngarcryyryannrrrctcyaagyaynnnactcgratagtcrnyngggyctcgarcccgnatnn

SEQ ID NO: 795475 - RNA, 221 nt, unidentified
  source 1..221: mol_type = unassigned RNA; note = ISPye16
  misc_difference 1: note = a, c, u, g, unknown, or other
  misc_difference 2: note = a, c, u, g, unknown, or other
  misc_difference 5: note = a, c, u, g, unknown, or other
  misc_difference 14: note = a, c, u, g, unknown, or other
  misc_difference 15: note = a, c, u, g, unknown, or other
  misc_difference 18: note = a, c, u, g, unknown, or other
  misc_difference 19: note = a, c, u, g, unknown, or other
  misc_difference 20: note = a, c, u, g, unknown, or other
  misc_difference 21: note = a, c, u, g, unknown, or other
  misc_difference 22: note = a, c, u, g, unknown, or other
  misc_difference 23: note = a, c, u, g, unknown, or other
  misc_difference 48: note = a, c, u, g, unknown, or other
  misc_difference 50: note = a, c, u, g, unknown, or other
  misc_difference 59: note = a, c, u, g, unknown, or other
  misc_difference 60: note = a, c, u, g, unknown, or other
  misc_difference 61: note = a, c, u, g, unknown, or other
  misc_difference 62: note = a, c, u, g, unknown, or other
  misc_difference 63: note = a, c, u, g, unknown, or other
  misc_difference 64: note = a, c, u, g, unknown, or other
  misc_difference 70: note = a, c, u, g, unknown, or other
  misc_difference 74: note = a, c, u, g, unknown, or other
  misc_difference 76: note = a, c, u, g, unknown, or other
  misc_difference 78: note = a, c, u, g, unknown, or other
  misc_difference 79: note = a, c, u, g, unknown, or other
  misc_difference 80: note = a, c, u, g, unknown, or other
  misc_difference 86: note = a, c, u, g, unknown, or other
  misc_difference 88: note = a, c, u, g, unknown, or other
  misc_difference 89: note = a, c, u, g, unknown, or other
  misc_difference 91: note = a, c, u, g, unknown, or other
  misc_difference 93: note = a, c, u, g, unknown, or other
  misc_difference 94: note = a, c, u, g, unknown, or other
  misc_difference 103: note = a, c, u, g, unknown, or other
  misc_difference 105: note = a, c, u, g, unknown, or other
  misc_difference 138: note = a, c, u, g, unknown, or other
  misc_difference 145: note = a, c, u, g, unknown, or other
  misc_difference 180: note = a, c, u, g, unknown, or other
  misc_difference 181: note = a, c, u, g, unknown, or other
  misc_difference 182: note = a, c, u, g, unknown, or other
  misc_difference 183: note = a, c, u, g, unknown, or other
  misc_difference 189: note = a, c, u, g, unknown, or other
  misc_difference 190: note = a, c, u, g, unknown, or other
  misc_difference 191: note = a, c, u, g, unknown, or other
  misc_difference 192: note = a, c, u, g, unknown, or other
  misc_difference 193: note = a, c, u, g, unknown, or other
  misc_difference 194: note = a, c, u, g, unknown, or other
  misc_difference 195: note = a, c, u, g, unknown, or other
  misc_difference 196: note = a, c, u, g, unknown, or other
  misc_difference 197: note = a, c, u, g, unknown, or other
  misc_difference 198: note = a, c, u, g, unknown, or other
  misc_difference 199: note = a, c, u, g, unknown, or other
  misc_difference 200: note = a, c, u, g, unknown, or other
  misc_difference 201: note = a, c, u, g, unknown, or other
  misc_difference 208: note = a, c, u, g, unknown, or other
  misc_difference 209: note = a, c, u, g, unknown, or other
  misc_difference 210: note = a, c, u, g, unknown, or other
  misc_difference 211: note = a, c, u, g, unknown, or other
nnrgnytgcrrgrnnyrnnnnnngatgacrrracrgyygaycgrcrynyngtaarccynnnnnnrraaancggncnynnngyycgnrnnantnnytrggaacnrnrygygcgratctcatcatggcctggyygcaayngcrgyynactygcragaggccggatacatttrygcaracygnnnnygycrnnnnnnnnnnnnncttgcannnncggggcggay

SEQ ID NO: 795476 - RNA, 181 nt, unidentified
  source 1..181: mol_type = unassigned RNA; note = ISDha10
  misc_difference 1: note = a, c, u, g, unknown, or other
  misc_difference 2: note = a, c, u, g, unknown, or other
  misc_difference 3: note = a, c, u, g, unknown, or other
  misc_difference 4: note = a, c, u, g, unknown, or other
  misc_difference 5: note = a, c, u, g, unknown, or other
  misc_difference 6: note = a, c, u, g, unknown, or other
  misc_difference 7: note = a, c, u, g, unknown, or other
  misc_difference 8: note = a, c, u, g, unknown, or other
  misc_difference 9: note = a, c, u, g, unknown, or other
  misc_difference 10: note = a, c, u, g, unknown, or other
  misc_difference 11: note = a, c, u, g, unknown, or other
  misc_difference 13: note = a, c, u, g, unknown, or other
  misc_difference 14: note = a, c, u, g, unknown, or other
  misc_difference 15: note = a, c, u, g, unknown, or other
  misc_difference 16: note = a, c, u, g, unknown, or other
  misc_difference 17: note = a, c, u, g, unknown, or other
  misc_difference 19: note = a, c, u, g, unknown, or other
  misc_difference 20: note = a, c, u, g, unknown, or other
  misc_difference 21: note = a, c, u, g, unknown, or other
  misc_difference 22: note = a, c, u, g, unknown, or other
  misc_difference 23: note = a, c, u, g, unknown, or other
  misc_difference 24: note = a, c, u, g, unknown, or other
  misc_difference 25: note = a, c, u, g, unknown, or other
  misc_difference 26: note = a, c, u, g, unknown, or other
  misc_difference 27: note = a, c, u, g, unknown, or other
  misc_difference 29: note = a, c, u, g, unknown, or other
  misc_difference 32: note = a, c, u, g, unknown, or other
  misc_difference 33: note = a, c, u, g, unknown, or other
  misc_difference 34: note = a, c, u, g, unknown, or other
  misc_difference 35: note = a, c, u, g, unknown, or other
  misc_difference 36: note = a, c, u, g, unknown, or other
  misc_difference 37: note = a, c, u, g, unknown, or other
  misc_difference 39: note = a, c, u, g, unknown, or other
  misc_difference 40: note = a, c, u, g, unknown, or other
  misc_difference 41: note = a, c, u, g, unknown, or other
  misc_difference 49: note = a, c, u, g, unknown, or other
  misc_difference 50: note = a, c, u, g, unknown, or other
  misc_difference 53: note = a, c, u, g, unknown, or other
  misc_difference 64: note = a, c, u, g, unknown, or other
  misc_difference 73: note = a, c, u, g, unknown, or other
  misc_difference 74: note = a, c, u, g, unknown, or other
  misc_difference 76: note = a, c, u, g, unknown, or other
  misc_difference 77: note = a, c, u, g, unknown, or other
  misc_difference 82: note = a, c, u, g, unknown, or other
  misc_difference 86: note = a, c, u, g, unknown, or other
  misc_difference 87: note = a, c, u, g, unknown, or other
  misc_difference 90: note = a, c, u, g, unknown, or other
  misc_difference 91: note = a, c, u, g, unknown, or other
  misc_difference 92: note = a, c, u, g, unknown, or other
  misc_difference 93: note = a, c, u, g, unknown, or other
  misc_difference 94: note = a, c, u, g, unknown, or other
  misc_difference 95: note = a, c, u, g, unknown, or other
  misc_difference 96: note = a, c, u, g, unknown, or other
  misc_difference 97: note = a, c, u, g, unknown, or other
  misc_difference 98: note = a, c, u, g, unknown, or other
  misc_difference 99: note = a, c, u, g, unknown, or other
  misc_difference 101: note = a, c, u, g, unknown, or other
  misc_difference 102: note = a, c, u, g, unknown, or other
  misc_difference 103: note = a, c, u, g, unknown, or other
  misc_difference 104: note = a, c, u, g, unknown, or other
  misc_difference 114: note = a, c, u, g, unknown, or other
  misc_difference 115: note = a, c, u, g, unknown, or other
  misc_difference 116: note = a, c, u, g, unknown, or other
  misc_difference 119: note = a, c, u, g, unknown, or other
  misc_difference 120: note = a, c, u, g, unknown, or other
  misc_difference 121: note = a, c, u, g, unknown, or other
  misc_difference 126: note = a, c, u, g, unknown, or other
  misc_difference 133: note = a, c, u, g, unknown, or other
  misc_difference 141: note = a, c, u, g, unknown, or other
  misc_difference 143: note = a, c, u, g, unknown, or other
  misc_difference 148: note = a, c, u, g, unknown, or other
  misc_difference 163: note = a, c, u, g, unknown, or other
  misc_difference 164: note = a, c, u, g, unknown, or other
  misc_difference 166: note = a, c, u, g, unknown, or other
  misc_difference 167: note = a, c, u, g, unknown, or other
  misc_difference 168: note = a, c, u, g, unknown, or other
  misc_difference 169: note = a, c, u, g, unknown, or other
  misc_difference 170: note = a, c, u, g, unknown, or other
  misc_difference 171: note = a, c, u, g, unknown, or other
  misc_difference 172: note = a, c, u, g, unknown, or other
  misc_difference 173: note = a, c, u, g, unknown, or other
  misc_difference 174: note = a, c, u, g, unknown, or other
  misc_difference 175: note = a, c, u, g, unknown, or other
  misc_difference 176: note = a, c, u, g, unknown, or other
  misc_difference 177: note = a, c, u, g, unknown, or other
nnnnnnnnnnnrnnnnnrnnnnnnnnnrnyynnnnnnynnnrtataatnnyynyygrrtagrrnrrtrrrygnnynncycyngggnnrynnnnnnnnnnrnnnntaccygtrrnnnagnnnrtyantccatynrryrarrntnyatgnttyrgctggttgrgnnynnnnnnnnnnnntacy

SEQ ID NO: 795477 - RNA, 155 nt, unidentified
  source 1..155: mol_type = unassigned RNA; note = ISMba20
  misc_difference 1: note = a, c, u, g, unknown, or other
  misc_difference 2: note = a, c, u, g, unknown, or other
  misc_difference 3: note = a, c, u, g, unknown, or other
  misc_difference 5: note = a, c, u, g, unknown, or other
  misc_difference 7: note = a, c, u, g, unknown, or other
  misc_difference 8: note = a, c, u, g, unknown, or other
  misc_difference 10: note = a, c, u, g, unknown, or other
  misc_difference 18: note = a, c, u, g, unknown, or other
  misc_difference 20: note = a, c, u, g, unknown, or other
  misc_difference 27: note = a, c, u, g, unknown, or other
  misc_difference 28: note = a, c, u, g, unknown, or other
  misc_difference 29: note = a, c, u, g, unknown, or other
  misc_difference 30: note = a, c, u, g, unknown, or other
  misc_difference 31: note = a, c, u, g, unknown, or other
  misc_difference 32: note = a, c, u, g, unknown, or other
  misc_difference 42: note = a, c, u, g, unknown, or other
  misc_difference 43: note = a, c, u, g, unknown, or other
  misc_difference 44: note = a, c, u, g, unknown, or other
  misc_difference 45: note = a, c, u, g, unknown, or other
  misc_difference 47: note = a, c, u, g, unknown, or other
  misc_difference 54: note = a, c, u, g, unknown, or other
  misc_difference 55: note = a, c, u, g, unknown, or other
  misc_difference 56: note = a, c, u, g, unknown, or other
  misc_difference 57: note = a, c, u, g, unknown, or other
  misc_difference 67: note = a, c, u, g, unknown, or other
  misc_difference 68: note = a, c, u, g, unknown, or other
  misc_difference 69: note = a, c, u, g, unknown, or other
  misc_difference 70: note = a, c, u, g, unknown, or other
  misc_difference 71: note = a, c, u, g, unknown, or other
  misc_difference 75: note = a, c, u, g, unknown, or other
  misc_difference 80: note = a, c, u, g, unknown, or other
  misc_difference 82: note = a, c, u, g, unknown, or other
  misc_difference 85: note = a, c, u, g, unknown, or other
  misc_difference 86: note = a, c, u, g, unknown, or other
  misc_difference 94: note = a, c, u, g, unknown, or other
  misc_difference 96: note = a, c, u, g, unknown, or other
  misc_difference 98: note = a, c, u, g, unknown, or other
  misc_difference 101: note = a, c, u, g, unknown, or other
  misc_difference 106: note = a, c, u, g, unknown, or other
  misc_difference 110: note = a, c, u, g, unknown, or other
  misc_difference 111: note = a, c, u, g, unknown, or other
  misc_difference 114: note = a, c, u, g, unknown, or other
  misc_difference 115: note = a, c, u, g, unknown, or other
  misc_difference 118: note = a, c, u, g, unknown, or other
  misc_difference 119: note = a, c, u, g, unknown, or other
  misc_difference 123: note = a, c, u, g, unknown, or other
  misc_difference 124: note = a, c, u, g, unknown, or other
  misc_difference 125: note = a, c, u, g, unknown, or other
  misc_difference 129: note = a, c, u, g, unknown, or other
  misc_difference 131: note = a, c, u, g, unknown, or other
  misc_difference 133: note = a, c, u, g, unknown, or other
  misc_difference 135: note = a, c, u, g, unknown, or other
  misc_difference 136: note = a, c, u, g, unknown, or other
  misc_difference 145: note = a, c, u, g, unknown, or other
  misc_difference 146: note = a, c, u, g, unknown, or other
  misc_difference 147: note = a, c, u, g, unknown, or other
  misc_difference 148: note = a, c, u, g, unknown, or other
  misc_difference 149: note = a, c, u, g, unknown, or other
  misc_difference 152: note = a, c, u, g, unknown, or other
  misc_difference 153: note = a, c, u, g, unknown, or other
  misc_difference 155: note = a, c, u, g, unknown, or other
nnnynynnyntgggyagnrnaggytgnnnnnnytttggrrynnnnanycygyynnnnaaactarycnnnnnryynyycgnanrcnnrartgygncnyngancrcgnatrnnaanntgnnyyynnnrrgnrnynynnctgcccaynnnnnrrnnrn

SEQ ID NO: 795478 - RNA, 186 nt, unidentified
  source 1..186: mol_type = unassigned RNA; note = ISOt5
  misc_difference 1: note = a, c, u, g, unknown, or other
  misc_difference 2: note = a, c, u, g, unknown, or other
  misc_difference 3: note = a, c, u, g, unknown, or other
  misc_difference 4: note = a, c, u, g, unknown, or other
  misc_difference 9: note = a, c, u, g, unknown, or other
  misc_difference 10: note = a, c, u, g, unknown, or other
  misc_difference 11: note = a, c, u, g, unknown, or other
  misc_difference 12: note = a, c, u, g, unknown, or other
  misc_difference 13: note = a, c, u, g, unknown, or other
  misc_difference 14: note = a, c, u, g, unknown, or other
  misc_difference 15: note = a, c, u, g, unknown, or other
  misc_difference 17: note = a, c, u, g, unknown, or other
  misc_difference 18: note = a, c, u, g, unknown, or other
  misc_difference 19: note = a, c, u, g, unknown, or other
  misc_difference 20: note = a, c, u, g, unknown, or other
  misc_difference 21: note = a, c, u, g, unknown, or other
  misc_difference 25: note = a, c, u, g, unknown, or other
  misc_difference 26: note = a, c, u, g, unknown, or other
  misc_difference 27: note = a, c, u, g, unknown, or other
  misc_difference 32: note = a, c, u, g, unknown, or other
  misc_difference 33: note = a, c, u, g, unknown, or other
  misc_difference 37: note = a, c, u, g, unknown, or other
  misc_difference 38: note = a, c, u, g, unknown, or other
  misc_difference 39: note = a, c, u, g, unknown, or other
  misc_difference 40: note = a, c, u, g, unknown, or other
  misc_difference 43: note = a, c, u, g, unknown, or other
  misc_difference 44: note = a, c, u, g, unknown, or other
  misc_difference 46: note = a, c, u, g, unknown, or other
  misc_difference 51: note = a, c, u, g, unknown, or other
  misc_difference 52: note = a, c, u, g, unknown, or other
  misc_difference 53: note = a, c, u, g, unknown, or other
  misc_difference 54: note = a, c, u, g, unknown, or other
  misc_difference 55: note = a, c, u, g, unknown, or other
  misc_difference 56: note = a, c, u, g, unknown, or other
  misc_difference 57: note = a, c, u, g, unknown, or other
  misc_difference 58: note = a, c, u, g, unknown, or other
  misc_difference 61: note = a, c, u, g, unknown, or other
  misc_difference 65: note = a, c, u, g, unknown, or other
  misc_difference 67: note = a, c, u, g, unknown, or other
  misc_difference 68: note = a, c, u, g, unknown, or other
  misc_difference 69: note = a, c, u, g, unknown, or other
  misc_difference 72: note = a, c, u, g, unknown, or other
  misc_difference 77: note = a, c, u, g, unknown, or other
  misc_difference 78: note = a, c, u, g, unknown, or other
  misc_difference 79: note = a, c, u, g, unknown, or other
  misc_difference 80: note = a, c, u, g, unknown, or other
  misc_difference 81: note = a, c, u, g, unknown, or other
  misc_difference 82: note = a, c, u, g, unknown, or other
  misc_difference 87: note = a, c, u, g, unknown, or other
  misc_difference 91: note = a, c, u, g, unknown, or other
  misc_difference 92: note = a, c, u, g, unknown, or other
  misc_difference 95: note = a, c, u, g, unknown, or other
  misc_difference 96: note = a, c, u, g, unknown, or other
  misc_difference 98: note = a, c, u, g, unknown, or other
  misc_difference 101: note = a, c, u, g, unknown, or other
  misc_difference 102: note = a, c, u, g, unknown, or other
  misc_difference 103: note = a, c, u, g, unknown, or other
  misc_difference 104: note = a, c, u, g, unknown, or other
  misc_difference 111: note = a, c, u, g, unknown, or other
  misc_difference 112: note = a, c, u, g, unknown, or other
  misc_difference 113: note = a, c, u, g, unknown, or other
  misc_difference 114: note = a, c, u, g, unknown, or other
  misc_difference 137: note = a, c, u, g, unknown, or other
  misc_difference 138: note = a, c, u, g, unknown, or other
  misc_difference 139: note = a, c, u, g, unknown, or other
  misc_difference 140: note = a, c, u, g, unknown, or other
  misc_difference 141: note = a, c, u, g, unknown, or other
  misc_difference 142: note = a, c, u, g, unknown, or other
  misc_difference 143: note = a, c, u, g, unknown, or other
  misc_difference 144: note = a, c, u, g, unknown, or other
  misc_difference 145: note = a, c, u, g, unknown, or other
  misc_difference 146: note = a, c, u, g, unknown, or other
  misc_difference 148: note = a, c, u, g, unknown, or other
  misc_difference 159: note = a, c, u, g, unknown, or other
  misc_difference 173: note = a, c, u, g, unknown, or other
  misc_difference 174: note = a, c, u, g, unknown, or other
  misc_difference 181: note = a, c, u, g, unknown, or other
  misc_difference 182: note = a, c, u, g, unknown, or other
  misc_difference 183: note = a, c, u, g, unknown, or other
  misc_difference 184: note = a, c, u, g, unknown, or other
  misc_difference 185: note = a, c, u, g, unknown, or other
nnnnryyrnnnnnnnynnnnnryrnnnrrrynnrrgnnnnrgnnanryygnnnnnnnnctnrggnynnnranccygnnnnnnagatnrgynncynnynyynnnntyryyynnnnarrycgracrgtatcttargccnnnnnnnnnnrngagcytgyatnyacaaggytgryynnrryrrrnnnnny

SEQ ID NO: 795479 - RNA, 307 nt, unidentified
  source 1..307: mol_type = unassigned RNA; note = ISLxx2
  misc_difference 3: note = a, c, u, g, unknown, or other
  misc_difference 4: note = a, c, u, g, unknown, or other
  misc_difference 5: note = a, c, u, g, unknown, or other
  misc_difference 12: note = a, c, u, g, unknown, or other
  misc_difference 15: note = a, c, u, g, unknown, or other
  misc_difference 17: note = a, c, u, g, unknown, or other
  misc_difference 20: note = a, c, u, g, unknown, or other
  misc_difference 22: note = a, c, u, g, unknown, or other
  misc_difference 23: note = a, c, u, g, unknown, or other
  misc_difference 28: note = a, c, u, g, unknown, or other
  misc_difference 29: note = a, c, u, g, unknown, or other
  misc_difference 30: note = a, c, u, g, unknown, or other
  misc_difference 41: note = a, c, u, g, unknown, or other
  misc_difference 51: note = a, c, u, g, unknown, or other
  misc_difference 52: note = a, c, u, g, unknown, or other
  misc_difference 56: note = a, c, u, g, unknown, or other
  misc_difference 61: note = a, c, u, g, unknown, or other
  misc_difference 65: note = a, c, u, g, unknown, or other
  misc_difference 66: note = a, c, u, g, unknown, or other
  misc_difference 71: note = a, c, u, g, unknown, or other
  misc_difference 72: note = a, c, u, g, unknown, or other
  misc_difference 74: note = a, c, u, g, unknown, or other
  misc_difference 75: note = a, c, u, g, unknown, or other
  misc_difference 76: note = a, c, u, g, unknown, or other
  misc_difference 77: note = a, c, u, g, unknown, or other
  misc_difference 80: note = a, c, u, g, unknown, or other
  misc_difference 81: note = a, c, u, g, unknown, or other
  misc_difference 84: note = a, c, u, g, unknown, or other
  misc_difference 87: note = a, c, u, g, unknown, or other
  misc_difference 90: note = a, c, u, g, unknown, or other
  misc_difference 97: note = a, c, u, g, unknown, or other
  misc_difference 99: note = a, c, u, g, unknown, or other
  misc_difference 102: note = a, c, u, g, unknown, or other
  misc_difference 103: note = a, c, u, g, unknown, or other
  misc_difference 126: note = a, c, u, g, unknown, or other
  misc_difference 127: note = a, c, u, g, unknown, or other
  misc_difference 128: note = a, c, u, g, unknown, or other
  misc_difference 129: note = a, c, u, g, unknown, or other
  misc_difference 130: note = a, c, u, g, unknown, or other
  misc_difference 131: note = a, c, u, g, unknown, or other
  misc_difference 132: note = a, c, u, g, unknown, or other
  misc_difference 170: note = a, c, u, g, unknown, or other
  misc_difference 171: note = a, c, u, g, unknown, or other
  misc_difference 172: note = a, c, u, g, unknown, or other
  misc_difference 182: note = a, c, u, g, unknown, or other
  misc_difference 197: note = a, c, u, g, unknown, or other
  misc_difference 198: note = a, c, u, g, unknown, or other
  misc_difference 220: note = a, c, u, g, unknown, or other
  misc_difference 223: note = a, c, u, g, unknown, or other
  misc_difference 224: note = a, c, u, g, unknown, or other
  misc_difference 225: note = a, c, u, g, unknown, or other
  misc_difference 226: note = a, c, u, g, unknown, or other
  misc_difference 230: note = a, c, u, g, unknown, or other
  misc_difference 232: note = a, c, u, g, unknown, or other
  misc_difference 234: note = a, c, u, g, unknown, or other
  misc_difference 248: note = a, c, u, g, unknown, or other
  misc_difference 249: note = a, c, u, g, unknown, or other
  misc_difference 250: note = a, c, u, g, unknown, or other
  misc_difference 251: note = a, c, u, g, unknown, or other
  misc_difference 252: note = a, c, u, g, unknown, or other
  misc_difference 257: note = a, c, u, g, unknown, or other
  misc_difference 259: note = a, c, u, g, unknown, or other
  misc_difference 260: note = a, c, u, g, unknown, or other
  misc_difference 266: note = a, c, u, g, unknown, or other
  misc_difference 271: note = a, c, u, g, unknown, or other
  misc_difference 272: note = a, c, u, g, unknown, or other
  misc_difference 273: note = a, c, u, g, unknown, or other
  misc_difference 274: note = a, c, u, g, unknown, or other
  misc_difference 275: note = a, c, u, g, unknown, or other
  misc_difference 276: note = a, c, u, g, unknown, or other
  misc_difference 277: note = a, c, u, g, unknown, or other
  misc_difference 278: note = a, c, u, g, unknown, or other
  misc_difference 279: note = a, c, u, g, unknown, or other
  misc_difference 282: note = a, c, u, g, unknown, or other
  misc_difference 284: note = a, c, u, g, unknown, or other
  misc_difference 285: note = a, c, u, g, unknown, or other
  misc_difference 286: note = a, c, u, g, unknown, or other
  misc_difference 292: note = a, c, u, g, unknown, or other
  misc_difference 293: note = a, c, u, g, unknown, or other
  misc_difference 294: note = a, c, u, g, unknown, or other
  misc_difference 296: note = a, c, u, g, unknown, or other
  misc_difference 297: note = a, c, u, g, unknown, or other
  misc_difference 302: note = a, c, u, g, unknown, or other
  misc_difference 303: note = a, c, u, g, unknown, or other
  misc_difference 305: note = a, c, u, g, unknown, or other
  misc_difference 306: note = a, c, u, g, unknown, or other
  misc_difference 307: note = a, c, u, g, unknown, or other
aynnngayagtnarnrnrynrnngccrnnnryyyyyrggynryytgrcycnnayancgayngrcnnyyrrnnynnnnygnngynrynrgnygyyycngngynnyctgacccrcactcygatcgacnnnnnnntgtctttccyyggayctgtcggyyryccgggrrcrycnnncggygaggynyygcctcgycgrygnnygtgaccyragragrgcctgrncrnnnngycncntnactgtcytgtccrnnnnnycgrnynngryrrngycrnnnnnnnnnyrnrnnngrrgrnnnrnnatgrnnrnnn

SEQ ID NO: 795480 - RNA, 241 nt, unidentified
  source 1..241: mol_type = unassigned RNA; note = ISPfa2
  misc_difference 22: note = a, c, u, g, unknown, or other
  misc_difference 31: note = a, c, u, g, unknown, or other
  misc_difference 45: note = a, c, u, g, unknown, or other
  misc_difference 51: note = a, c, u, g, unknown, or other
  misc_difference 76: note = a, c, u, g, unknown, or other
  misc_difference 77: note = a, c, u, g, unknown, or other
  misc_difference 78: note = a, c, u, g, unknown, or other
  misc_difference 79: note = a, c, u, g, unknown, or other
  misc_difference 80: note = a, c, u, g, unknown, or other
  misc_difference 81: note = a, c, u, g, unknown, or other
  misc_difference 82: note = a, c, u, g, unknown, or other
  misc_difference 83: note = a, c, u, g, unknown, or other
  misc_difference 84: note = a, c, u, g, unknown, or other
  misc_difference 100: note = a, c, u, g, unknown, or other
  misc_difference 101: note = a, c, u, g, unknown, or other
  misc_difference 102: note = a, c, u, g, unknown, or other
  misc_difference 103: note = a, c, u, g, unknown, or other
  misc_difference 104: note = a, c, u, g, unknown, or other
  misc_difference 105: note = a, c, u, g, unknown, or other
  misc_difference 113: note = a, c, u, g, unknown, or other
  misc_difference 133: note = a, c, u, g, unknown, or other
  misc_difference 147: note = a, c, u, g, unknown, or other
  misc_difference 148: note = a, c, u, g, unknown, or other
  misc_difference 149: note = a, c, u, g, unknown, or other
  misc_difference 150: note = a, c, u, g, unknown, or other
  misc_difference 151: note = a, c, u, g, unknown, or other
  misc_difference 152: note = a, c, u, g, unknown, or other
  misc_difference 154: note = a, c, u, g, unknown, or other
  misc_difference 155: note = a, c, u, g, unknown, or other
  misc_difference 162: note = a, c, u, g, unknown, or other
  misc_difference 163: note = a, c, u, g, unknown, or other
  misc_difference 197: note = a, c, u, g, unknown, or other
  misc_difference 201: note = a, c, u, g, unknown, or other
  misc_difference 202: note = a, c, u, g, unknown, or other
  misc_difference 203: note = a, c, u, g, unknown, or other
  misc_difference 207: note = a, c, u, g, unknown, or other
  misc_difference 208: note = a, c, u, g, unknown, or other
  misc_difference 212: note = a, c, u, g, unknown, or other
  misc_difference 213: note = a, c, u, g, unknown, or other
  misc_difference 214: note = a, c, u, g, unknown, or other
  misc_difference 217: note = a, c, u, g, unknown, or other
  misc_difference 218: note = a, c, u, g, unknown, or other
  misc_difference 224: note = a, c, u, g, unknown, or other
  misc_difference 225: note = a, c, u, g, unknown, or other
  misc_difference 230: note = a, c, u, g, unknown, or other
rtgrrcgtcraaaggttgcgynrgyaatygnrygtgatgacrarncaggtnggaccgggactcgcyaaacctgrannnnnnnnngagcyyyragctcgynnnnnnaatgaggngygrgtcagcggattycatngrggccygcagcrnnnnnnynngctgcannaaggccgratatararctgcarycyrycctgtynrtcnnnrcrnnyrrnnncynnyrcaannrggrnrcgyycatrya

SEQ ID NO: 795481 - RNA, 235 nt, unidentified
  source 1..235: mol_type = unassigned RNA; note = ISSde4
  misc_difference 1: note = a, c, u, g, unknown, or other
  misc_difference 2: note = a, c, u, g, unknown, or other
  misc_difference 3: note = a, c, u, g, unknown, or other
  misc_difference 7: note = a, c, u, g, unknown, or other
  misc_difference 10: note = a, c, u, g, unknown, or other
  misc_difference 11: note = a, c, u, g, unknown, or other
  misc_difference 12: note = a, c, u, g, unknown, or other
  misc_difference 19: note = a, c, u, g, unknown, or other
  misc_difference 23: note = a, c, u, g, unknown, or other
  misc_difference 24: note = a, c, u, g, unknown, or other
  misc_difference 25: note = a, c, u, g, unknown, or other
  misc_difference 26: note = a, c, u, g, unknown, or other
  misc_difference 27: note = a, c, u, g, unknown, or other
  misc_difference 28: note = a, c, u, g, unknown, or other
  misc_difference 29: note = a, c, u, g, unknown, or other
  misc_difference 30: note = a, c, u, g, unknown, or other
  misc_difference 31: note = a, c, u, g, unknown, or other
  misc_difference 32: note = a, c, u, g, unknown, or other
  misc_difference 33: note = a, c, u, g, unknown, or other
  misc_difference 34: note = a, c, u, g, unknown, or other
  misc_difference 41: note = a, c, u, g, unknown, or other
  misc_difference 42: note = a, c, u, g, unknown, or other
  misc_difference 46: note = a, c, u, g, unknown, or other
  misc_difference 59: note = a, c, u, g, unknown, or other
  misc_difference 61: note = a, c, u, g, unknown, or other
  misc_difference 68: note = a, c, u, g, unknown, or other
  misc_difference 73: note = a, c, u, g, unknown, or other
  misc_difference 74: note = a, c, u, g, unknown, or other
  misc_difference 75: note = a, c, u, g, unknown, or other
  misc_difference 76: note = a, c, u, g, unknown, or other
  misc_difference 77: note = a, c, u, g, unknown, or other
  misc_difference 78: note = a, c, u, g, unknown, or other
  misc_difference 79: note = a, c, u, g, unknown, or other
  misc_difference 80: note = a, c, u, g, unknown, or other
  misc_difference 81: note = a, c, u, g, unknown, or other
  misc_difference 82: note = a, c, u, g, unknown, or other
  misc_difference 83: note = a, c, u, g, unknown, or other
  misc_difference 88: note = a, c, u, g, unknown, or other
  misc_difference 89: note = a, c, u, g, unknown, or other
  misc_difference 90: note = a, c, u, g, unknown, or other
  misc_difference 91: note = a, c, u, g, unknown, or other
  misc_difference 92: note = a, c, u, g, unknown, or other
  misc_difference 100: note = a, c, u, g, unknown, or other
  misc_difference 101: note = a, c, u, g, unknown, or other
  misc_difference 102: note = a, c, u, g, unknown, or other
  misc_difference 103: note = a, c, u, g, unknown, or other
  misc_difference 104: note = a, c, u, g, unknown, or other
  misc_difference 105: note = a, c, u, g, unknown, or other
  misc_difference 114: note = a, c, u, g, unknown, or other
  misc_difference 118: note = a, c, u, g, unknown, or other
  misc_difference 120: note = a, c, u, g, unknown, or other
  misc_difference 141: note = a, c, u, g, unknown, or other
  misc_difference 146: note = a, c, u, g, unknown, or other
  misc_difference 147: note = a, c, u, g, unknown, or other
  misc_difference 148: note = a, c, u, g, unknown, or other
  misc_difference 149: note = a, c, u, g, unknown, or other
  misc_difference 150: note = a, c, u, g, unknown, or other
  misc_difference 151: note = a, c, u, g, unknown, or other
  misc_difference 152: note = a, c, u, g, unknown, or other
  misc_difference 153: note = a, c, u, g, unknown, or other
  misc_difference 154: note = a, c, u, g, unknown, or other
  misc_difference 160: note = a, c, u, g, unknown, or other
  misc_difference 161: note = a, c, u, g, unknown, or other
  misc_difference 162: note = a, c, u, g, unknown, or other
  misc_difference 163: note = a, c, u, g, unknown, or other
  misc_difference 164: note = a, c, u, g, unknown, or other
  misc_difference 179: note = a, c, u, g, unknown, or other
  misc_difference 180: note = a, c, u, g, unknown, or other
  misc_difference 181: note = a, c, u, g, unknown, or other
  misc_difference 185: note = a, c, u, g, unknown, or other
  misc_difference 187: note = a, c, u, g, unknown, or other
  misc_difference 188: note = a, c, u, g, unknown, or other
  misc_difference 189: note = a, c, u, g, unknown, or other
  misc_difference 190: note = a, c, u, g, unknown, or other
  misc_difference 191: note = a, c, u, g, unknown, or other
  misc_difference 195: note = a, c, u, g, unknown, or other
  misc_difference 196: note = a, c, u, g, unknown, or other
  misc_difference 197: note = a, c, u, g, unknown, or other
  misc_difference 198: note = a, c, u, g, unknown, or other
  misc_difference 199: note = a, c, u, g, unknown, or other
  misc_difference 203: note = a, c, u, g, unknown, or other
  misc_difference 204: note = a, c, u, g, unknown, or other
  misc_difference 205: note = a, c, u, g, unknown, or other
  misc_difference 206: note = a, c, u, g, unknown, or other
  misc_difference 207: note = a, c, u, g, unknown, or other
  misc_difference 208: note = a, c, u, g, unknown, or other
  misc_difference 209: note = a, c, u, g, unknown, or other
  misc_difference 210: note = a, c, u, g, unknown, or other
  misc_difference 211: note = a, c, u, g, unknown, or other
  misc_difference 212: note = a, c, u, g, unknown, or other
  misc_difference 219: note = a, c, u, g, unknown, or other
  misc_difference 220: note = a, c, u, g, unknown, or other
  misc_difference 221: note = a, c, u, g, unknown, or other
  misc_difference 222: note = a, c, u, g, unknown, or other
  misc_difference 226: note = a, c, u, g, unknown, or other
  misc_difference 230: note = a, c, u, g, unknown, or other
nnnyyynyynnnrrttgcnrrgnnnnnnnnnnnngatgrynnraynggtyagaccrgcnynyyyarancctgnnnnnnnnnnnggcynnnnnrargccgnnnnnntgatraggnrrrnrngygcrratyycatcrrggcyngrrrnnnnnnnnnyyycrnnnnnargccgratatatgnnngcanynnnnnyyynnnnnryynnnnnnnnnncttgcannnnrrrnrrgnccata

SEQ ID NO: 795482 - RNA, 167 nt, unidentified
  source 1..167: mol_type = unassigned RNA; note = ISPtu2
  misc_difference 1: note = a, c, u, g, unknown, or other
  misc_difference 2: note = a, c, u, g, unknown, or other
  misc_difference 3: note = a, c, u, g, unknown, or other
  misc_difference 4: note = a, c, u, g, unknown, or other
  misc_difference 5: note = a, c, u, g, unknown, or other
  misc_difference 6: note = a, c, u, g, unknown, or other
  misc_difference 13: note = a, c, u, g, unknown, or other
  misc_difference 14: note = a, c, u, g, unknown, or other
  misc_difference 24: note = a, c, u, g, unknown, or other
  misc_difference 25: note = a, c, u, g, unknown, or other
  misc_difference 33: note = a, c, u, g, unknown, or other
  misc_difference 36: note = a, c, u, g, unknown, or other
  misc_difference 44: note = a, c, u, g, unknown, or other
  misc_difference 50: note = a, c, u, g, unknown, or other
  misc_difference 63: note = a, c, u, g, unknown, or other
  misc_difference 65: note = a, c, u, g, unknown, or other
  misc_difference 66: note = a, c, u, g, unknown, or other
  misc_difference 67: note = a, c, u, g, unknown, or other
  misc_difference 68: note = a, c, u, g, unknown, or other
  misc_difference 69: note = a, c, u, g, unknown, or other
  misc_difference 70: note = a, c, u, g, unknown, or other
  misc_difference 71: note = a, c, u, g, unknown, or other
  misc_difference 72: note = a, c, u, g, unknown, or other
  misc_difference 81: note = a, c, u, g, unknown, or other
  misc_difference 82: note = a, c, u, g, unknown, or other
  misc_difference 94: note = a, c, u, g, unknown, or other
  misc_difference 102: note = a, c, u, g, unknown, or other
  misc_difference 104: note = a, c, u, g, unknown, or other
  misc_difference 115: note = a, c, u, g, unknown, or other
  misc_difference 117: note = a, c, u, g, unknown, or other
  misc_difference 118: note = a, c, u, g, unknown, or other
  misc_difference 128: note = a, c, u, g, unknown, or other
  misc_difference 129: note = a, c, u, g, unknown, or other
  misc_difference 130: note = a, c, u, g, unknown, or other
  misc_difference 131: note = a, c, u, g, unknown, or other
  misc_difference 146: note = a, c, u, g, unknown, or other
  misc_difference 148: note = a, c, u, g, unknown, or other
  misc_difference 163: note = a, c, u, g, unknown, or other
  misc_difference 166: note = a, c, u, g, unknown, or other
  misc_difference 167: note = a, c, u, g, unknown, or other
nnnnnngggtaanntgagrcccanncttyrgyngcnacyraagnyyyytntryrgyagytcgnynnnnnnnnggytcctcnntygagagaccgntaacaagnrngarcrcyryanrnnactcyaagynnnnractcgrayagtcrnyngggyctcgarcccgnatnn

SEQ ID NO: 795483 - RNA, 196 nt, unidentified
  source 1..196: mol_type = unassigned RNA; note = IS1492
  misc_difference 3: note = a, c, u, g, unknown, or other
  misc_difference 4: note = a, c, u, g, unknown, or other
  misc_difference 7: note = a, c, u, g, unknown, or other
  misc_difference 13: note = a, c, u, g, unknown, or other
  misc_difference 14: note = a, c, u, g, unknown, or other
  misc_difference 24: note = a, c, u, g, unknown, or other
  misc_difference 27: note = a, c, u, g, unknown, or other
  misc_difference 29: note = a, c, u, g, unknown, or other
  misc_difference 45: note = a, c, u, g, unknown, or other
  misc_difference 49: note = a, c, u, g, unknown, or other
  misc_difference 51: note = a, c, u, g, unknown, or other
  misc_difference 61: note = a, c, u, g, unknown, or other
  misc_difference 63: note = a, c, u, g, unknown, or other
  misc_difference 65: note = a, c, u, g, unknown, or other
  misc_difference 66: note = a, c, u, g, unknown, or other
  misc_difference 71: note = a, c, u, g, unknown, or other
  misc_difference 72: note = a, c, u, g, unknown, or other
  misc_difference 73: note = a, c, u, g, unknown, or other
  misc_difference 74: note = a, c, u, g, unknown, or other
  misc_difference 75: note = a, c, u, g, unknown, or other
  misc_difference 76: note = a, c, u, g, unknown, or other
  misc_difference 77: note = a, c, u, g, unknown, or other
  misc_difference 78: note = a, c, u, g, unknown, or other
  misc_difference 80: note = a, c, u, g, unknown, or other
  misc_difference 81: note = a, c, u, g, unknown, or other
  misc_difference 86: note = a, c, u, g, unknown, or other
  misc_difference 94: note = a, c, u, g, unknown, or other
  misc_difference 104: note = a, c, u, g, unknown, or other
  misc_difference 129: note = a, c, u, g, unknown, or other
  misc_difference 132: note = a, c, u, g, unknown, or other
  misc_difference 134: note = a, c, u, g, unknown, or other
  misc_difference 135: note = a, c, u, g, unknown, or other
  misc_difference 136: note = a, c, u, g, unknown, or other
  misc_difference 139: note = a, c, u, g, unknown, or other
  misc_difference 141: note = a, c, u, g, unknown, or other
  misc_difference 151: note = a, c, u, g, unknown, or other
  misc_difference 159: note = a, c, u, g, unknown, or other
  misc_difference 161: note = a, c, u, g, unknown, or other
  misc_difference 169: note = a, c, u, g, unknown, or other
  misc_difference 171: note = a, c, u, g, unknown, or other
  misc_difference 177: note = a, c, u, g, unknown, or other
  misc_difference 180: note = a, c, u, g, unknown, or other
  misc_difference 183: note = a, c, u, g, unknown, or other
  misc_difference 184: note = a, c, u, g, unknown, or other
  misc_difference 186: note = a, c, u, g, unknown, or other
  misc_difference 188: note = a, c, u, g, unknown, or other
  misc_difference 189: note = a, c, u, g, unknown, or other
  misc_difference 190: note = a, c, u, g, unknown, or other
  misc_difference 191: note = a, c, u, g, unknown, or other
  misc_difference 192: note = a, c, u, g, unknown, or other
  misc_difference 193: note = a, c, u, g, unknown, or other
  misc_difference 194: note = a, c, u, g, unknown, or other
  misc_difference 195: note = a, c, u, g, unknown, or other
  misc_difference 196: note = a, c, u, g, unknown, or other
yynnygnrcygcnnrcgttgatgngrnrngggttggacccgcgynrggnrnryctgryyanynynnrgrgnnnnnnnnrnnyccgnytarcganygaggyycyngcgygcgtctttcatcagggtccgngcnrnnngcncnryatgaccgnttgtagtnyngcrgtccnynrycytnyynyrnnrnrnnnnnnnnn

SEQ ID NO: 795484 - RNA, 233 nt, unidentified
  source 1..233: mol_type = unassigned RNA; note = ISCth7
  misc_difference 1: note = a, c, u, g, unknown, or other
  misc_difference 2: note = a, c, u, g, unknown, or other
  misc_difference 3: note = a, c, u, g, unknown, or other
  misc_difference 7: note = a, c, u, g, unknown, or other
  misc_difference 8: note = a, c, u, g, unknown, or other
  misc_difference 9: note = a, c, u, g, unknown, or other
  misc_difference 10: note = a, c, u, g, unknown, or other
  misc_difference 11: note = a, c, u, g, unknown, or other
  misc_difference 12: note = a, c, u, g, unknown, or other
  misc_difference 13: note = a, c, u, g, unknown, or other
  misc_difference 14: note = a, c, u, g, unknown, or other
  misc_difference 15: note = a, c, u, g, unknown, or other
  misc_difference 16: note = a, c, u, g, unknown, or other
  misc_difference 17: note = a, c, u, g, unknown, or other
  misc_difference 18: note = a, c, u, g, unknown, or other
  misc_difference 19: note = a, c, u, g, unknown, or other
  misc_difference 20: note = a, c, u, g, unknown, or other
  misc_difference 21: note = a, c, u, g, unknown, or other
  misc_difference 22: note = a, c, u, g, unknown, or other
  misc_difference 23: note = a, c, u, g, unknown, or other
  misc_difference 24: note = a, c, u, g, unknown, or other
  misc_difference 25: note = a, c, u, g, unknown, or other
  misc_difference 26: note = a, c, u, g, unknown, or other
  misc_difference 27: note = a, c, u, g, unknown, or other
  misc_difference 28: note = a, c, u, g, unknown, or other
  misc_difference 29: note = a, c, u, g, unknown, or other
  misc_difference 30: note = a, c, u, g, unknown, or other
  misc_difference 31: note = a, c, u, g, unknown, or other
  misc_difference 32: note = a, c, u, g, unknown, or other
  misc_difference 33: note = a, c, u, g, unknown, or other
  misc_difference 35: note = a, c, u, g, unknown, or other
  misc_difference 36: note = a, c, u, g, unknown, or other
  misc_difference 37: note = a, c, u, g, unknown, or other
  misc_difference 38: note = a, c, u, g, unknown, or other
  misc_difference 39: note = a, c, u, g, unknown, or other
  misc_difference 40: note = a, c, u, g, unknown, or other
  misc_difference 41: note = a, c, u, g, unknown, or other
  misc_difference 42: note = a, c, u, g, unknown, or other
  misc_difference 43: note = a, c, u, g, unknown, or other
  misc_difference 44: note = a, c, u, g, unknown, or other
  misc_difference 45: note = a, c, u, g, unknown, or other
  misc_difference 46: note = a, c, u, g, unknown, or other
  misc_difference 47: note = a, c, u, g, unknown, or other
  misc_difference 48: note = a, c, u, g, unknown, or other
  misc_difference 49: note = a, c, u, g, unknown, or other
  misc_difference 50: note = a, c, u, g, unknown, or other
  misc_difference 53: note = a, c, u, g, unknown, or other
  misc_difference 61: note = a, c, u, g, unknown, or other
  misc_difference 62: note = a, c, u, g, unknown, or other
  misc_difference 63: note = a, c, u, g, unknown, or other
  misc_difference 69: note = a, c, u, g, unknown, or other
  misc_difference 74: note = a, c, u, g, unknown, or other
  misc_difference 79: note = a, c, u, g, unknown, or other
  misc_difference 81: note = a, c, u, g, unknown, or other
  misc_difference 83: note = a, c, u, g, unknown, or other
  misc_difference 85: note = a, c, u, g, unknown, or other
  misc_difference 86: note = a, c, u, g, unknown, or other
  misc_difference 87: note = a, c, u, g, unknown, or other
  misc_difference 88: note = a, c, u, g, unknown, or other
  misc_difference 89: note = a, c, u, g, unknown, or other
  misc_difference 101: note = a, c, u, g, unknown, or other
  misc_difference 102: note = a, c, u, g, unknown, or other
  misc_difference 103: note = a, c, u, g, unknown, or other
  misc_difference 104: note = a, c, u, g, unknown, or other
  misc_difference 105: note = a, c, u, g, unknown, or other
  misc_difference 111: note = a, c, u, g, unknown, or other
  misc_difference 112: note = a, c, u, g, unknown, or other
  misc_difference 113: note = a, c, u, g, unknown, or other
  misc_difference 114: note = a, c, u, g, unknown, or other
  misc_difference 115: note = a, c, u, g, unknown, or other
  misc_difference 120: note = a, c, u, g, unknown, or other
  misc_difference 122: note = a, c, u, g, unknown, or other
  misc_difference 123: note = a, c, u, g, unknown, or other
  misc_difference 130: note = a, c, u, g, unknown, or other
  misc_difference 131: note = a, c, u, g, unknown, or other
  misc_difference 141: note = a, c, u, g, unknown, or other
  misc_difference 142: note = a, c, u, g, unknown, or other
  misc_difference 143: note = a, c, u, g, unknown, or other
  misc_difference 144: note = a, c, u, g, unknown, or other
  misc_difference 146: note = a, c, u, g, unknown, or other
  misc_difference 156: note = a, c, u, g, unknown, or other
  misc_difference 159: note = a, c, u, g, unknown, or other
  misc_difference 162: note = a, c, u, g, unknown, or other
  misc_difference 163: note = a, c, u, g, unknown, or other
  misc_difference 164: note = a, c, u, g, unknown, or other
  misc_difference 165: note = a, c, u, g, unknown, or other
  misc_difference 166: note = a, c, u, g, unknown, or other
  misc_difference 167: note = a, c, u, g, unknown, or other
  misc_difference 168: note = a, c, u, g, unknown, or other
  misc_difference 169: note = a, c, u, g, unknown, or other
  misc_difference 170: note = a, c, u, g, unknown, or other
  misc_difference 171: note = a, c, u, g, unknown, or other
  misc_difference 172: note = a, c, u, g, unknown, or other
  misc_difference 173: note = a, c, u, g, unknown, or other
  misc_difference 174: note = a, c, u, g, unknown, or other
  misc_difference 175: note = a, c, u, g, unknown, or other
  misc_difference 176: note = a, c, u, g, unknown, or other
  misc_difference 178: note = a, c, u, g, unknown, or other
  misc_difference 182: note = a, c, u, g, unknown, or other
  misc_difference 185: note = a, c, u, g, unknown, or other
  misc_difference 186: note = a, c, u, g, unknown, or other
  misc_difference 188: note = a, c, u, g, unknown, or other
  misc_difference 189: note = a, c, u, g, unknown, or other
  misc_difference 201: note = a, c, u, g, unknown, or other
  misc_difference 211: note = a, c, u, g, unknown, or other
  misc_difference 212: note = a, c, u, g, unknown, or other
  misc_difference 213: note = a, c, u, g, unknown, or other
  misc_difference 214: note = a, c, u, g, unknown, or other
  misc_difference 216: note = a, c, u, g, unknown, or other
  misc_difference 220: note = a, c, u, g, unknown, or other
  misc_difference 221: note = a, c, u, g, unknown, or other
  misc_difference 222: note = a, c, u, g, unknown, or other
  misc_difference 223: note = a, c, u, g, unknown, or other
  misc_difference 231: note = a, c, u, g, unknown, or other
  misc_difference 232: note = a, c, u, g, unknown, or other
  misc_difference 233: note = a, c, u, g, unknown, or other
nnnryynnnnnnnnnnnnnnnnnnnnnnnnnnnynnnnnnnnnnnnnnnnyrnrryaatrnnnyyryrnrgryngrgrnynyngnnnnnyyccttgrrrynnnnnyyycrnnnnnragrntnnygccycnnyyytrcgrrnnnnyncgaatragcnrgntrnnnnnnnnnnnnnnnynyygnrtnncnnacraggytgyrnyycgyrrrgnnnngnggrnnnnyyyrycynnn

SEQ ID NO: 795485 - RNA, 250 nt, unidentified
  source 1..250: mol_type = unassigned RNA; note = ISMno26
  misc_difference 2: note = a, c, u, g, unknown, or other
  misc_difference 3: note = a, c, u, g, unknown, or other
  misc_difference 4: note = a, c, u, g, unknown, or other
  misc_difference 5: note = a, c, u, g, unknown, or other
  misc_difference 6: note = a, c, u, g, unknown, or other
  misc_difference 8: note = a, c, u, g, unknown, or other
  misc_difference 9: note = a, c, u, g, unknown, or other
  misc_difference 10: note = a, c, u, g, unknown, or other
  misc_difference 11: note = a, c, u, g, unknown, or other
  misc_difference 12: note = a, c, u, g, unknown, or other
  misc_difference 14: note = a, c, u, g, unknown, or other
  misc_difference 15: note = a, c, u, g, unknown, or other
  misc_difference 16: note = a, c, u, g, unknown, or other
  misc_difference 17: note = a, c, u, g, unknown, or other
  misc_difference 18: note = a, c, u, g, unknown, or other
  misc_difference 20: note = a, c, u, g, unknown, or other
  misc_difference 21: note = a, c, u, g, unknown, or other
  misc_difference 22: note = a, c, u, g, unknown, or other
  misc_difference 26: note = a, c, u, g, unknown, or other
  misc_difference 28: note = a, c, u, g, unknown, or other
  misc_difference 29: note = a, c, u, g, unknown, or other
  misc_difference 30: note = a, c, u, g, unknown, or other
  misc_difference 31: note = a, c, u, g, unknown, or other
  misc_difference 32: note = a, c, u, g, unknown, or other
  misc_difference 33: note = a, c, u, g, unknown, or other
  misc_difference 34: note = a, c, u, g, unknown, or other
  misc_difference 35: note = a, c, u, g, unknown, or other
  misc_difference 36: note = a, c, u, g, unknown, or other
  misc_difference 37: note = a, c, u, g, unknown, or other
  misc_difference 38: note = a, c, u, g, unknown, or other
  misc_difference 39: note = a, c, u, g, unknown, or other
  misc_difference 50: note = a, c, u, g, unknown, or other
  misc_difference 51: note = a, c, u, g, unknown, or other
  misc_difference 52: note = a, c, u, g, unknown, or other
  misc_difference 54: note = a, c, u, g, unknown, or other
  misc_difference 57: note = a, c, u, g, unknown, or other
  misc_difference 67: note = a, c, u, g, unknown, or other
  misc_difference 69: note = a, c, u, g, unknown, or other
  misc_difference 81: note = a, c, u, g, unknown, or other
  misc_difference 90: note = a, c, u, g, unknown, or other
  misc_difference 91: note = a, c, u, g, unknown, or other
  misc_difference 98: note = a, c, u, g, unknown, or other
  misc_difference 99: note = a, c, u, g, unknown, or other
  misc_difference 100: note = a, c, u, g, unknown, or other
  misc_difference 101: note = a, c, u, g, unknown, or other
  misc_difference 103: note = a, c, u, g, unknown, or other
  misc_difference 104: note = a, c, u, g, unknown, or other
  misc_difference 105: note = a, c, u, g, unknown, or other
  misc_difference 106: note = a, c, u, g, unknown, or other
  misc_difference 107: note = a, c, u, g, unknown, or other
  misc_difference 108: note = a, c, u, g, unknown, or other
  misc_difference 113: note = a, c, u, g, unknown, or other
  misc_difference 114: note = a, c, u, g, unknown, or other
  misc_difference 115: note = a, c, u, g, unknown, or other
  misc_difference 116: note = a, c, u, g, unknown, or other
  misc_difference 124: note = a, c, u, g, unknown, or other
  misc_difference 125: note = a, c, u, g, unknown, or other
  misc_difference 127: note = a, c, u, g, unknown, or other
  misc_difference 128: note = a, c, u, g, unknown, or other
  misc_difference 129: note = a, c, u, g, unknown, or other
  misc_difference 134: note = a, c, u, g, unknown, or other
  misc_difference 174: note = a, c, u, g, unknown, or other
  misc_difference 175: note = a, c, u, g, unknown, or other
  misc_difference 177: note = a, c, u, g, unknown, or other
  misc_difference 185: note = a, c, u, g, unknown, or other
  misc_difference 186: note = a, c, u, g, unknown, or other
  misc_difference 188: note = a, c, u, g, unknown, or other
  misc_difference 217: note = a, c, u, g, unknown, or other
  misc_difference 218: note = a, c, u, g, unknown, or other
  misc_difference 219: note = a, c, u, g, unknown, or other
  misc_difference 225: note = a, c, u, g, unknown, or other
  misc_difference 230: note = a, c, u, g, unknown, or other
  misc_difference 231: note = a, c, u, g, unknown, or other
  misc_difference 232: note = a, c, u, g, unknown, or other
  misc_difference 233: note = a, c, u, g, unknown, or other
  misc_difference 234: note = a, c, u, g, unknown, or other
  misc_difference 235: note = a, c, u, g, unknown, or other
  misc_difference 236: note = a, c, u, g, unknown, or other
  misc_difference 244: note = a, c, u, g, unknown, or other
  misc_difference 245: note = a, c, u, g, unknown, or other
  misc_difference 246: note = a, c, u, g, unknown, or other
  misc_difference 248: note = a, c, u, g, unknown, or other
ynnnnnynnnnnynnnnnrnnngyynrnnnnnnnnnnnnygyrrgggygnnnrngrnrtgatgrcrnrncggtcgrrccgnggayyggrnnarcccgnnnnrnnnnnngcgcnnnnragcrcgnnrnnntgatngggaycyrrtcygcggaytycatcarggccagcggycrynnrnrccgcrynnanaggccgracayatgrcygcacccgaccrnnnygyyrncryynnnnnnnyycttgcnnnrnrg

SEQ ID NO: 795486 - RNA, 161 nt, unidentified
  source 1..161: mol_type = unassigned RNA; note = ISSto5
  misc_difference 1: note = a, c, u, g, unknown, or other
  misc_difference 2: note = a, c, u, g, unknown, or other
  misc_difference 3: note = a, c, u, g, unknown, or other
  misc_difference 5: note = a, c, u, g, unknown, or other
  misc_difference 6: note = a, c, u, g, unknown, or other
  misc_difference 8: note = a, c, u, g, unknown, or other
  misc_difference 10: note = a, c, u, g, unknown, or other
  misc_difference 11: note = a, c, u, g, unknown, or other
  misc_difference 12: note = a, c, u, g, unknown, or other
  misc_difference 13: note = a, c, u, g, unknown, or other
  misc_difference 14: note = a, c, u, g, unknown, or other
  misc_difference 17: note = a, c, u, g, unknown, or other
  misc_difference 18: note = a, c, u, g, unknown, or other
  misc_difference 20: note = a, c, u, g, unknown, or other
  misc_difference 21: note = a, c, u, g, unknown, or other
  misc_difference 23: note = a, c, u, g, unknown, or other
  misc_difference 24: note = a, c, u, g, unknown, or other
  misc_difference 25: note = a, c, u, g, unknown, or other
  misc_difference 27: note = a, c, u, g, unknown, or other
  misc_difference 31: note = a, c, u, g, unknown, or other
  misc_difference 32: note = a, c, u, g, unknown, or other
  misc_difference 33: note = a, c, u, g, unknown, or other
  misc_difference 34: note = a, c, u, g, unknown, or other
  misc_difference 35: note = a, c, u, g, unknown, or other
  misc_difference 36: note = a, c, u, g, unknown, or other
  misc_difference 37: note = a, c, u, g, unknown, or other
  misc_difference 38: note = a, c, u, g, unknown, or other
  misc_difference 39: note = a, c, u, g, unknown, or other
  misc_difference 40: note = a, c, u, g, unknown, or other
  misc_difference 41: note = a, c, u, g, unknown, or other
  misc_difference 43: note = a, c, u, g, unknown, or other
  misc_difference 45: note = a, c, u, g, unknown, or other
  misc_difference 47: note = a, c, u, g, unknown, or other
  misc_difference 48: note = a, c, u, g, unknown, or other
  misc_difference 49: note = a, c, u, g, unknown, or other
  misc_difference 56: note = a, c, u, g, unknown, or other
  misc_difference 57: note = a, c, u, g, unknown, or other
  misc_difference 59: note = a, c, u, g, unknown, or other
  misc_difference 60: note = a, c, u, g, unknown, or other
  misc_difference 61: note = a, c, u, g, unknown, or other
  misc_difference 62: note = a, c, u, g, unknown, or other
  misc_difference 63: note = a, c, u, g, unknown, or other
  misc_difference 64: note = a, c, u, g, unknown, or other
  misc_difference 66: note = a, c, u, g, unknown, or other
  misc_difference 67: note = a, c, u, g, unknown, or other
  misc_difference 69: note = a, c, u, g, unknown, or other
  misc_difference 70: note = a, c, u, g, unknown, or other
  misc_difference 71: note = a, c, u, g, unknown, or other
  misc_difference 73: note = a, c, u, g, unknown, or other
  misc_difference 74: note = a, c, u, g, unknown, or other
  misc_difference 75: note = a, c, u, g, unknown, or other
  misc_difference 77: note = a, c, u, g, unknown, or other
  misc_difference 78: note = a, c, u, g, unknown, or other
  misc_difference 79: note = a, c, u, g, unknown, or other
  misc_difference 80: note = a, c, u, g, unknown, or other
  misc_difference 81: note = a, c, u, g, unknown, or other
  misc_difference 85: note = a, c, u, g, unknown, or other
  misc_difference 87: note = a, c, u, g, unknown, or other
  misc_difference 88: note = a, c, u, g, unknown, or other
  misc_difference 89: note = a, c, u, g, unknown, or other
  misc_difference 90: note = a, c, u, g, unknown, or other
  misc_difference 91: note = a, c, u, g, unknown, or other
  misc_difference 92: note = a, c, u, g, unknown, or other
  misc_difference 97: note = a, c, u, g, unknown, or other
  misc_difference 98: note = a, c, u, g, unknown, or other
  misc_difference 99: note = a, c, u, g, unknown, or other
  misc_difference 100: note = a, c, u, g, unknown, or other
  misc_difference 104: note = a, c, u, g, unknown, or other
  misc_difference 105: note = a, c, u, g, unknown, or other
  misc_difference 106: note = a, c, u, g, unknown, or other
  misc_difference 111: note = a, c, u, g, unknown, or other
  misc_difference 112: note = a, c, u, g, unknown, or other
  misc_difference 113: note = a, c, u, g, unknown, or other
  misc_difference 114: note = a, c, u, g, unknown, or other
  misc_difference 115: note = a, c, u, g, unknown, or other
  misc_difference 116: note = a, c, u, g, unknown, or other
  misc_difference 117: note = a, c, u, g, unknown, or other
  misc_difference 118: note = a, c, u, g, unknown, or other
  misc_difference 119: note = a, c, u, g, unknown, or other
  misc_difference 120: note = a, c, u, g, unknown, or other
  misc_difference 121: note = a, c, u, g, unknown, or other
  misc_difference 122: note = a, c, u, g, unknown, or other
  misc_difference 126: note = a, c, u, g, unknown, or other
  misc_difference 127: note = a, c, u, g, unknown, or other
  misc_difference 128: note = a, c, u, g, unknown, or other
  misc_difference 129: note = a, c, u, g, unknown, or other
  misc_difference 130: note = a, c, u, g, unknown, or other
  misc_difference 133: note = a, c, u, g, unknown, or other
  misc_difference 134: note = a, c, u, g, unknown, or other
  misc_difference 136: note = a, c, u, g, unknown, or other
  misc_difference 138: note = a, c, u, g, unknown, or other
  misc_difference 141: note = a, c, u, g, unknown, or other
  misc_difference 142: note = a, c, u, g, unknown, or other
  misc_difference 143: note = a, c, u, g, unknown, or other
  misc_difference 144: note = a, c, u, g, unknown, or other
  misc_difference 148: note = a, c, u, g, unknown, or other
  misc_difference 150: note = a, c, u, g, unknown, or other
  misc_difference 151: note = a, c, u, g, unknown, or other
  misc_difference 152: note = a, c, u, g, unknown, or other
  misc_difference 153: note = a, c, u, g, unknown, or other
  misc_difference 155: note = a, c, u, g, unknown, or other
  misc_difference 157: note = a, c, u, g, unknown, or other
  misc_difference 158: note = a, c, u, g, unknown, or other
  misc_difference 159: note = a, c, u, g, unknown, or other
  misc_difference 160: note = a, c, u, g, unknown, or other
  misc_difference 161: note = a, c, u, g, unknown, or other
nnnrnnrnynnnnnrrnnrnnrnnnrnyyrnnnnnnnnnnnrnrnynnnaryyyrnnynnnnnnrnnynnnynnnynnnnnyrynynnnnnnyyrrnnnnyrynnnrrrynnnnnnnnnnnnyyrnnnnnrynnrnynrrnnnnrrrnrnnnnynynnnnn

SEQ ID NO: 795487 - RNA, 223 nt, unidentified
  source 1..223: mol_type = unassigned RNA; note = ISCfr13
  misc_difference 1: note = a, c, u, g, unknown, or other
  misc_difference 2: note = a, c, u, g, unknown, or other
  misc_difference 3: note = a, c, u, g, unknown, or other
  misc_difference 4: note = a, c, u, g, unknown, or other
  misc_difference 5: note = a, c, u, g, unknown, or other
  misc_difference 11: note = a, c, u, g, unknown, or other
  misc_difference 12: note = a, c, u, g, unknown, or other
  misc_difference 13: note = a, c, u, g, unknown, or other
  misc_difference 14: note = a, c, u, g, unknown, or other
  misc_difference 15: note = a, c, u, g, unknown, or other
  misc_difference 16: note = a, c, u, g, unknown, or other
  misc_difference 19: note = a, c, u, g, unknown, or other
  misc_difference 21: note = a, c, u, g, unknown, or other
  misc_difference 25: note = a, c, u, g, unknown, or other
  misc_difference 26: note = a, c, u, g, unknown, or other
  misc_difference 27: note = a, c, u, g, unknown, or other
  misc_difference 28: note = a, c, u, g, unknown, or other
  misc_difference 29: note = a, c, u, g, unknown, or other
  misc_difference 32: note = a, c, u, g, unknown, or other
  misc_difference 34: note = a, c, u, g, unknown, or other
  misc_difference 35: note = a, c, u, g, unknown, or other
  misc_difference 36: note = a, c, u, g, unknown, or other
  misc_difference 37: note = a, c, u, g, unknown, or other
  misc_difference 40: note = a, c, u, g, unknown, or other
  misc_difference 43: note = a, c, u, g, unknown, or other
  misc_difference 52: note = a, c, u, g, unknown, or other
  misc_difference 54: note = a, c, u, g, unknown, or other
  misc_difference 55: note = a, c, u, g, unknown, or other
  misc_difference 64: note = a, c, u, g, unknown, or other
  misc_difference 65: note = a, c, u, g, unknown, or other
  misc_difference 66: note = a, c, u, g, unknown, or other
  misc_difference 67: note = a, c, u, g, unknown, or other
  misc_difference 68: note = a, c, u, g, unknown, or other
  misc_difference 69: note = a, c, u, g, unknown, or other
  misc_difference 71: note = a, c, u, g, unknown, or other
  misc_difference 72: note = a, c, u, g, unknown, or other
  misc_difference 73: note = a, c, u, g, unknown, or other
  misc_difference 75: note = a, c, u, g, unknown, or other
  misc_difference 79: note = a, c, u, g, unknown, or other
  misc_difference 80: note = a, c, u, g, unknown, or other
  misc_difference 85: note = a, c, u, g, unknown, or other
  misc_difference 88: note = a, c, u, g, unknown, or other
  misc_difference 97: note = a, c, u, g, unknown, or other
  misc_difference 104: note = a, c, u, g, unknown, or other
  misc_difference 105: note = a, c, u, g, unknown, or other
  misc_difference 107: note = a, c, u, g, unknown, or other
  misc_difference 116: note = a, c, u, g, unknown, or other
  misc_difference 119: note = a, c, u, g, unknown, or other
  misc_difference 120: note = a, c, u, g, unknown, or other
  misc_difference 121: note = a, c, u, g, unknown, or other
  misc_difference 127: note = a, c, u, g, unknown, or other
  misc_difference 128: note = a, c, u, g, unknown, or other
  misc_difference 145: note = a, c, u, g, unknown, or other
  misc_difference 149: note = a, c, u, g, unknown, or other
  misc_difference 150: note = a, c, u, g, unknown, or other
  misc_difference 151: note = a, c, u, g, unknown, or other
  misc_difference 152: note = a, c, u, g, unknown, or other
  misc_difference 153: note = a, c, u, g, unknown, or other
  misc_difference 154: note = a, c, u, g, unknown, or other
  misc_difference 156: note = a, c, u, g, unknown, or other
  misc_difference 157: note = a, c, u, g, unknown, or other
  misc_difference 158: note = a, c, u, g, unknown, or other
  misc_difference 162: note = a, c, u, g, unknown, or other
  misc_difference 163: note = a, c, u, g, unknown, or other
  misc_difference 171: note = a, c, u, g, unknown, or other
  misc_difference 172: note = a, c, u, g, unknown, or other
  misc_difference 178: note = a, c, u, g, unknown, or other
  misc_difference 179: note = a, c, u, g, unknown, or other
  misc_difference 184: note = a, c, u, g, unknown, or other
  misc_difference 185: note = a, c, u, g, unknown, or other
  misc_difference 189: note = a, c, u, g, unknown, or other
  misc_difference 190: note = a, c, u, g, unknown, or other
  misc_difference 191: note = a, c, u, g, unknown, or other
  misc_difference 195: note = a, c, u, g, unknown, or other
  misc_difference 199: note = a, c, u, g, unknown, or other
  misc_difference 200: note = a, c, u, g, unknown, or other
  misc_difference 202: note = a, c, u, g, unknown, or other
  misc_difference 203: note = a, c, u, g, unknown, or other
  misc_difference 206: note = a, c, u, g, unknown, or other
  misc_difference 208: note = a, c, u, g, unknown, or other
  misc_difference 211: note = a, c, u, g, unknown, or other
  misc_difference 212: note = a, c, u, g, unknown, or other
  misc_difference 217: note = a, c, u, g, unknown, or other
  misc_difference 219: note = a, c, u, g, unknown, or other
  misc_difference 220: note = a, c, u, g, unknown, or other
  misc_difference 221: note = a, c, u, g, unknown, or other
  misc_difference 222: note = a, c, u, g, unknown, or other
nnnnnrycyynnnnnnrrnynryannnnnrynrnnnnrrnyrngyrcyyrynrnntacgaayrnnnnnncnnnancrynnraygntyncygyttyrnytycgannynryrrgtrcnyynnnrytcrnnracgaayrctcagggynygcnnnnnnannngytnnctatattnnyttcgnngarcnnrrgnnnrcanryynnynnyanynrynngragnynnnna

SEQ ID NO: 795488 - RNA, 202 nt, unidentified
  source 1..202: mol_type = unassigned RNA; note = ISKpn2
  misc_difference 1: note = a, c, u, g, unknown, or other
  misc_difference 2: note = a, c, u, g, unknown, or other
  misc_difference 3: note = a, c, u, g, unknown, or other
  misc_difference 11: note = a, c, u, g, unknown, or other
  misc_difference 14: note = a, c, u, g, unknown, or other
  misc_difference 16: note = a, c, u, g, unknown, or other
  misc_difference 17: note = a, c, u, g, unknown, or other
  misc_difference 18: note = a, c, u, g, unknown, or other
  misc_difference 19: note = a, c, u, g, unknown, or other
  misc_difference 21: note = a, c, u, g, unknown, or other
  misc_difference 22: note = a, c, u, g, unknown, or other
  misc_difference 28: note = a, c, u, g, unknown, or other
  misc_difference 29: note = a, c, u, g, unknown, or other
  misc_difference 30: note = a, c, u, g, unknown, or other
  misc_difference 31: note = a, c, u, g, unknown, or other
  misc_difference 34: note = a, c, u, g, unknown, or other
  misc_difference 38: note = a, c, u, g, unknown, or other
  misc_difference 49: note = a, c, u, g, unknown, or other
  misc_difference 51: note = a, c, u, g, unknown, or other
  misc_difference 52: note = a, c, u, g, unknown, or other
  misc_difference 61: note = a, c, u, g, unknown, or other
  misc_difference 63: note = a, c, u, g, unknown, or other
  misc_difference 64: note = a, c, u, g, unknown, or other
  misc_difference 65: note = a, c, u, g, unknown, or other
  misc_difference 66: note = a, c, u, g, unknown, or other
  misc_difference 69: note = a, c, u, g, unknown, or other
  misc_difference 70: note = a, c, u, g, unknown, or other
  misc_difference 71: note = a, c, u, g, unknown, or other
  misc_difference 76: note = a, c, u, g, unknown, or other
  misc_difference 85: note = a, c, u, g, unknown, or other
  misc_difference 86: note = a, c, u, g, unknown, or other
  misc_difference 87: note = a, c, u, g, unknown, or other
  misc_difference 88: note = a, c, u, g, unknown, or other
  misc_difference 89: note = a, c, u, g, unknown, or other
  misc_difference 90: note = a, c, u, g, unknown, or other
  misc_difference 94: note = a, c, u, g, unknown, or other
  misc_difference 100: note = a, c, u, g, unknown, or other
  misc_difference 102: note = a, c, u, g, unknown, or other
  misc_difference 104: note = a, c, u, g, unknown, or other
  misc_difference 115: note = a, c, u, g, unknown, or other
  misc_difference 122: note = a, c, u, g, unknown, or other
  misc_difference 127: note = a, c, u, g, unknown, or other
  misc_difference 128: note = a, c, u, g, unknown, or other
  misc_difference 129: note = a, c, u, g, unknown, or other
  misc_difference 130: note = a, c, u, g, unknown, or other
  misc_difference 131: note = a, c, u, g, unknown, or other
  misc_difference 133: note = a, c, u, g, unknown, or other
  misc_difference 134: note = a, c, u, g, unknown, or other
  misc_difference 135: note = a, c, u, g, unknown, or other
  misc_difference 136: note = a, c, u, g, unknown, or other
  misc_difference 137: note = a, c, u, g, unknown, or other
  misc_difference 139: note = a, c, u, g, unknown, or other
  misc_difference 140: note = a, c, u, g, unknown, or other
  misc_difference 141: note = a, c, u, g, unknown, or other
  misc_difference 142: note = a, c, u, g, unknown, or other
  misc_difference 145: note = a, c, u, g, unknown, or other
  misc_difference 154: note = a, c, u, g, unknown, or other
  misc_difference 159: note = a, c, u, g, unknown, or other
  misc_difference 160: note = a, c, u, g, unknown, or other
  misc_difference 168: note = a, c, u, g, unknown, or other
  misc_difference 171: note = a, c, u, g, unknown, or other
  misc_difference 172: note = a, c, u, g, unknown, or other
  misc_difference 173: note = a, c, u, g, unknown, or other
  misc_difference 174: note = a, c, u, g, unknown, or other
  misc_difference 177: note = a, c, u, g, unknown, or other
  misc_difference 178: note = a, c, u, g, unknown, or other
  misc_difference 179: note = a, c, u, g, unknown, or other
  misc_difference 180: note = a, c, u, g, unknown, or other
  misc_difference 181: note = a, c, u, g, unknown, or other
  misc_difference 182: note = a, c, u, g, unknown, or other
  misc_difference 183: note = a, c, u, g, unknown, or other
  misc_difference 184: note = a, c, u, g, unknown, or other
  misc_difference 185: note = a, c, u, g, unknown, or other
  misc_difference 186: note = a, c, u, g, unknown, or other
  misc_difference 187: note = a, c, u, g, unknown, or other
  misc_difference 188: note = a, c, u, g, unknown, or other
  misc_difference 189: note = a, c, u, g, unknown, or other
  misc_difference 190: note = a, c, u, g, unknown, or other
  misc_difference 196: note = a, c, u, g, unknown, or other
  misc_difference 197: note = a, c, u, g, unknown, or other
  misc_difference 198: note = a, c, u, g, unknown, or other
  misc_difference 199: note = a, c, u, g, unknown, or other
  misc_difference 200: note = a, c, u, g, unknown, or other
nnnrrttgcrnrrnrnnnnrnnratgrnnnnrynggtnrraccrrcrynynnrrarcctgnynnnnrynnnggcynyyrargccnnnnnnytgnygaggnrnrnrygygcggatnyccatyngggcnnnnnrnnnnnynnnnrangccgratanatgynngcaryyrnyynnnnrynnnnnnnnnnnnnncttgcnnnnngr

SEQ ID NO: 795489 - RNA, 274 nt, unidentified
  source 1..274: mol_type = unassigned RNA; note = ISPye26
  misc_difference 2: note = a, c, u, g, unknown, or other
  misc_difference 19: note = a, c, u, g, unknown, or other
  misc_difference 22: note = a, c, u, g, unknown, or other
  misc_difference 28: note = a, c, u, g, unknown, or other
  misc_difference 36: note = a, c, u, g, unknown, or other
  misc_difference 38: note = a, c, u, g, unknown, or other
  misc_difference 39: note = a, c, u, g, unknown, or other
  misc_difference 44: note = a, c, u, g, unknown, or other
  misc_difference 51: note = a, c, u, g, unknown, or other
  misc_difference 56: note = a, c, u, g, unknown, or other
  misc_difference 64: note = a, c, u, g, unknown, or other
  misc_difference 68: note = a, c, u, g, unknown, or other
  misc_difference 69: note = a, c, u, g, unknown, or other
  misc_difference 91: note = a, c, u, g, unknown, or other
  misc_difference 116: note = a, c, u, g, unknown, or other
  misc_difference 117: note = a, c, u, g, unknown, or other
  misc_difference 118: note = a, c, u, g, unknown, or other
  misc_difference 119: note = a, c, u, g, unknown, or other
  misc_difference 120: note = a, c, u, g, unknown, or other
  misc_difference 121: note = a, c, u, g, unknown, or other
  misc_difference 122: note = a, c, u, g, unknown, or other
  misc_difference 123: note = a, c, u, g, unknown, or other
  misc_difference 124: note = a, c, u, g, unknown, or other
  misc_difference 125: note = a, c, u, g, unknown, or other
  misc_difference 126: note = a, c, u, g, unknown, or other
  misc_difference 142: note = a, c, u, g, unknown, or other
  misc_difference 143: note = a, c, u, g, unknown, or other
  misc_difference 144: note = a, c, u, g, unknown, or other
  misc_difference 145: note = a, c, u, g, unknown, or other
  misc_difference 146: note = a, c, u, g, unknown, or other
  misc_difference 151: note = a, c, u, g, unknown, or other
  misc_difference 170: note = a, c, u, g, unknown, or other
  misc_difference 171: note = a, c, u, g, unknown, or other
  misc_difference 183: note = a, c, u, g, unknown, or other
  misc_difference 189: note = a, c, u, g, unknown, or other
  misc_difference 190: note = a, c, u, g, unknown, or other
  misc_difference 193: note = a, c, u, g, unknown, or other
  misc_difference 194: note = a, c, u, g, unknown, or other
  misc_difference 195: note = a, c, u, g, unknown, or other
  misc_difference 196: note = a, c, u, g, unknown, or other
  misc_difference 197: note = a, c, u, g, unknown, or other
  misc_difference 206: note = a, c, u, g, unknown, or other
  misc_difference 207: note = a, c, u, g, unknown, or other
  misc_difference 222: note = a, c, u, g, unknown, or other
  misc_difference 235: note = a, c, u, g, unknown, or other
  misc_difference 241: note = a, c, u, g, unknown, or other
  misc_difference 243: note = a, c, u, g, unknown, or other
  misc_difference 244: note = a, c, u, g, unknown, or other
  misc_difference 245: note = a, c, u, g, unknown, or other
  misc_difference 247: note = a, c, u, g, unknown, or other
  misc_difference 251: note = a, c, u, g, unknown, or other
  misc_difference 252: note = a, c, u, g, unknown, or other
  misc_difference 253: note = a, c, u, g, unknown, or other
  misc_difference 257: note = a, c, u, g, unknown, or other
  misc_difference 270: note = a, c, u, g, unknown, or other
  misc_difference 271: note = a, c, u, g, unknown, or other
  misc_difference 272: note = a, c, u, g, unknown, or other
  misc_difference 273: note = a, c, u, g, unknown, or other
ynrrgctccggyygyrrcngcntrrrcnryyrygrnynngrgrnygtcrrnrrygnrrgrrggncrrnngrrrrgtatggcgcaacrgtcnrygagacgggrtcrgraraaccagnnnnnnnnnnngygcyyyragcrcgynnnnnygryntggaycygryccrcgracnnccatacgggccngcggcnnrynnnnngycgcayynnaggccgrayayaygncagcaycygayynygcgcnrnnnynyyynnnrrrnyyyycttgcryynnnnr

SEQ ID NO: 795490 - RNA, 242 nt, unidentified
  source 1..242: mol_type = unassigned RNA; note = ISAzs4
  misc_difference 1: note = a, c, u, g, unknown, or other
  misc_difference 2: note = a, c, u, g, unknown, or other
  misc_difference 3: note = a, c, u, g, unknown, or other
  misc_difference 4: note = a, c, u, g, unknown, or other
  misc_difference 5: note = a, c, u, g, unknown, or other
  misc_difference 6: note = a, c, u, g, unknown, or other
  misc_difference 7: note = a, c, u, g, unknown, or other
  misc_difference 9: note = a, c, u, g, unknown, or other
  misc_difference 13: note = a, c, u, g, unknown, or other
  misc_difference 14: note = a, c, u, g, unknown, or other
  misc_difference 15: note = a, c, u, g, unknown, or other
  misc_difference 16: note = a, c, u, g, unknown, or other
  misc_difference 17: note = a, c, u, g, unknown, or other
  misc_difference 18: note = a, c, u, g, unknown, or other
  misc_difference 21: note = a, c, u, g, unknown, or other
  misc_difference 23: note = a, c, u, g, unknown, or other
  misc_difference 24: note = a, c, u, g, unknown, or other
  misc_difference 25: note = a, c, u, g, unknown, or other
  misc_difference 29: note = a, c, u, g, unknown, or other
  misc_difference 30: note = a, c, u, g, unknown, or other
  misc_difference 32: note = a, c, u, g, unknown, or other
  misc_difference 33: note = a, c, u, g, unknown, or other
  misc_difference 44: note = a, c, u, g, unknown, or other
  misc_difference 45: note = a, c, u, g, unknown, or other
  misc_difference 50: note = a, c, u, g, unknown, or other
  misc_difference 57: note = a, c, u, g, unknown, or other
  misc_difference 62: note = a, c, u, g, unknown, or other
  misc_difference 74: note = a, c, u, g, unknown, or other
  misc_difference 83: note = a, c, u, g, unknown, or other
  misc_difference 84: note = a, c, u, g, unknown, or other
  misc_difference 91: note = a, c, u, g, unknown, or other
  misc_difference 92: note = a, c, u, g, unknown, or other
  misc_difference 94: note = a, c, u, g, unknown, or other
  misc_difference 95: note = a, c, u, g, unknown, or other
  misc_difference 96: note = a, c, u, g, unknown, or other
  misc_difference 99: note = a, c, u, g, unknown, or other
  misc_difference 100: note = a, c, u, g, unknown, or other
  misc_difference 105: note = a, c, u, g, unknown, or other
  misc_difference 106: note = a, c, u, g, unknown, or other
  misc_difference 107: note = a, c, u, g, unknown, or other
  misc_difference 108: note = a, c, u, g, unknown, or other
  misc_difference 113: note = a, c, u, g, unknown, or other
  misc_difference 116: note = a, c, u, g, unknown, or other
  misc_difference 117: note = a, c, u, g, unknown, or other
  misc_difference 119: note = a, c, u, g, unknown, or other
  misc_difference 120: note = a, c, u, g, unknown, or other
  misc_difference 121: note = a, c, u, g, unknown, or other
  misc_difference 131: note = a, c, u, g, unknown, or other
  misc_difference 146: note = a, c, u, g, unknown, or other
  misc_difference 166: note = a, c, u, g, unknown, or other
  misc_difference 167: note = a, c, u, g, unknown, or other
  misc_difference 168: note = a, c, u, g, unknown, or other
  misc_difference 169: note = a, c, u, g, unknown, or other
  misc_difference 177: note = a, c, u, g, unknown, or other
  misc_difference 180: note = a, c, u, g, unknown, or other
  misc_difference 209: note = a, c, u, g, unknown, or other
  misc_difference 210: note = a, c, u, g, unknown, or other
  misc_difference 211: note = a, c, u, g, unknown, or other
  misc_difference 216: note = a, c, u, g, unknown, or other
  misc_difference 217: note = a, c, u, g, unknown, or other
  misc_difference 222: note = a, c, u, g, unknown, or other
  misc_difference 223: note = a, c, u, g, unknown, or other
  misc_difference 224: note = a, c, u, g, unknown, or other
  misc_difference 225: note = a, c, u, g, unknown, or other
  misc_difference 226: note = a, c, u, g, unknown, or other
  misc_difference 227: note = a, c, u, g, unknown, or other
  misc_difference 235: note = a, c, u, g, unknown, or other
  misc_difference 236: note = a, c, u, g, unknown, or other
  misc_difference 237: note = a, c, u, g, unknown, or other
  misc_difference 239: note = a, c, u, g, unknown, or other
  misc_difference 240: note = a, c, u, g, unknown, or other
nnnnnnnrnyrrnnnnnngynrnnnrrynnrnnygyrrgggygnnrrgrngtgatgncraancggtcrrrccgnggryyrgrnnaryccrnnrnnnyynngygcnnnnragcncgnnrnnntgatyggrancyrrycygcggayyncatcarggccagcggycrynnnnrccgcrynranaggccgracayatgryygcayccgaccrnnnyryynnyryynnnnnnyycttgcnnnrnngg

SEQ ID NO: 795491 - RNA, 217 nt, unidentified
  source 1..217: mol_type = unassigned RNA; note = ISVpa1
  misc_difference 2: note = a, c, u, g, unknown, or other
  misc_difference 5: note = a, c, u, g, unknown, or other
  misc_difference 13: note = a, c, u, g, unknown, or other
  misc_difference 14: note = a, c, u, g, unknown, or other
  misc_difference 16: note = a, c, u, g, unknown, or other
  misc_difference 17: note = a, c, u, g, unknown, or other
  misc_difference 18: note = a, c, u, g, unknown, or other
  misc_difference 19: note = a, c, u, g, unknown, or other
  misc_difference 20: note = a, c, u, g, unknown, or other
  misc_difference 21: note = a, c, u, g, unknown, or other
  misc_difference 22: note = a, c, u, g, unknown, or other
  misc_difference 23: note = a, c, u, g, unknown, or other
  misc_difference 24: note = a, c, u, g, unknown, or other
  misc_difference 25: note = a, c, u, g, unknown, or other
  misc_difference 32: note = a, c, u, g, unknown, or other
  misc_difference 33: note = a, c, u, g, unknown, or other
  misc_difference 34: note = a, c, u, g, unknown, or other
  misc_difference 41: note = a, c, u, g, unknown, or other
  misc_difference 42: note = a, c, u, g, unknown, or other
  misc_difference 44: note = a, c, u, g, unknown, or other
  misc_difference 49: note = a, c, u, g, unknown, or other
  misc_difference 50: note = a, c, u, g, unknown, or other
  misc_difference 51: note = a, c, u, g, unknown, or other
  misc_difference 52: note = a, c, u, g, unknown, or other
  misc_difference 54: note = a, c, u, g, unknown, or other
  misc_difference 57: note = a, c, u, g, unknown, or other
  misc_difference 64: note = a, c, u, g, unknown, or other
  misc_difference 65: note = a, c, u, g, unknown, or other
  misc_difference 66: note = a, c, u, g, unknown, or other
  misc_difference 67: note = a, c, u, g, unknown, or other
  misc_difference 68: note = a, c, u, g, unknown, or other
  misc_difference 69: note = a, c, u, g, unknown, or other
  misc_difference 70: note = a, c, u, g, unknown, or other
  misc_difference 71: note = a, c, u, g, unknown, or other
  misc_difference 73: note = a, c, u, g, unknown, or other
  misc_difference 74: note = a, c, u, g, unknown, or other
  misc_difference 78: note = a, c, u, g, unknown, or other
  misc_difference 79: note = a, c, u, g, unknown, or other
  misc_difference 80: note = a, c, u, g, unknown, or other
  misc_difference 81: note = a, c, u, g, unknown, or other
  misc_difference 84: note = a, c, u, g, unknown, or other
  misc_difference 89: note = a, c, u, g, unknown, or other
  misc_difference 90: note = a, c, u, g, unknown, or other
  misc_difference 91: note = a, c, u, g, unknown, or other
  misc_difference 92: note = a, c, u, g, unknown, or other
  misc_difference 93: note = a, c, u, g, unknown, or other
  misc_difference 96: note = a, c, u, g, unknown, or other
  misc_difference 97: note = a, c, u, g, unknown, or other
  misc_difference 99: note = a, c, u, g, unknown, or other
  misc_difference 105: note = a, c, u, g, unknown, or other
  misc_difference 107: note = a, c, u, g, unknown, or other
  misc_difference 109: note = a, c, u, g, unknown, or other
  misc_difference 110: note = a, c, u, g, unknown, or other
  misc_difference 117: note = a, c, u, g, unknown, or other
  misc_difference 126: note = a, c, u, g, unknown, or other
  misc_difference 129: note = a, c, u, g, unknown, or other
  misc_difference 130: note = a, c, u, g, unknown, or other
  misc_difference 136: note = a, c, u, g, unknown, or other
  misc_difference 137: note = a, c, u, g, unknown, or other
  misc_difference 138: note = a, c, u, g, unknown, or other
  misc_difference 139: note = a, c, u, g, unknown, or other
  misc_difference 140: note = a, c, u, g, unknown, or other
  misc_difference 144: note = a, c, u, g, unknown, or other
  misc_difference 146: note = a, c, u, g, unknown, or other
  misc_difference 147: note = a, c, u, g, unknown, or other
  misc_difference 148: note = a, c, u, g, unknown, or other
  misc_difference 149: note = a, c, u, g, unknown, or other
  misc_difference 152: note = a, c, u, g, unknown, or other
  misc_difference 153: note = a, c, u, g, unknown, or other
  misc_difference 161: note = a, c, u, g, unknown, or other
  misc_difference 165: note = a, c, u, g, unknown, or other
  misc_difference 167: note = a, c, u, g, unknown, or other
  misc_difference 175: note = a, c, u, g, unknown, or other
  misc_difference 176: note = a, c, u, g, unknown, or other
  misc_difference 177: note = a, c, u, g, unknown, or other
  misc_difference 178: note = a, c, u, g, unknown, or other
  misc_difference 179: note = a, c, u, g, unknown, or other
  misc_difference 180: note = a, c, u, g, unknown, or other
  misc_difference 185: note = a, c, u, g, unknown, or other
  misc_difference 187: note = a, c, u, g, unknown, or other
  misc_difference 188: note = a, c, u, g, unknown, or other
  misc_difference 189: note = a, c, u, g, unknown, or other
  misc_difference 190: note = a, c, u, g, unknown, or other
  misc_difference 191: note = a, c, u, g, unknown, or other
  misc_difference 192: note = a, c, u, g, unknown, or other
  misc_difference 194: note = a, c, u, g, unknown, or other
  misc_difference 195: note = a, c, u, g, unknown, or other
  misc_difference 196: note = a, c, u, g, unknown, or other
  misc_difference 197: note = a, c, u, g, unknown, or other
  misc_difference 198: note = a, c, u, g, unknown, or other
  misc_difference 205: note = a, c, u, g, unknown, or other
  misc_difference 206: note = a, c, u, g, unknown, or other
  misc_difference 207: note = a, c, u, g, unknown, or other
  misc_difference 208: note = a, c, u, g, unknown, or other
  misc_difference 209: note = a, c, u, g, unknown, or other
  misc_difference 213: note = a, c, u, g, unknown, or other
  misc_difference 214: note = a, c, u, g, unknown, or other
  misc_difference 215: note = a, c, u, g, unknown, or other
cnrrntytgcrrnnrnnnnnnnnnngatgrcnnnaacggynnrncrrcnnnnynrrnaacctgnnnnnnnnannrgynnnnrangcyrnnnnnytnntnaggaynrnynngcgcgrntyycatcrnggnncrrrrnnnnnyyynrnnnnrannccgratanatynrngcarrycnnnnnnryyrnynnnnnnynnnnnttgcarnnnnnrrrnnnrc

SEQ ID NO: 795492 - RNA, 166 nt, unidentified
  source 1..166: mol_type = unassigned RNA; note = ISEc32
  misc_difference 1: note = a, c, u, g, unknown, or other
  misc_difference 2: note = a, c, u, g, unknown, or other
  misc_difference 3: note = a, c, u, g, unknown, or other
  misc_difference 4: note = a, c, u, g, unknown, or other
  misc_difference 5: note = a, c, u, g, unknown, or other
  misc_difference 15: note = a, c, u, g, unknown, or other
  misc_difference 16: note = a, c, u, g, unknown, or other
  misc_difference 18: note = a, c, u, g, unknown, or other
  misc_difference 19: note = a, c, u, g, unknown, or other
  misc_difference 31: note = a, c, u, g, unknown, or other
  misc_difference 32: note = a, c, u, g, unknown, or other
  misc_difference 33: note = a, c, u, g, unknown, or other
  misc_difference 34: note = a, c, u, g, unknown, or other
  misc_difference 35: note = a, c, u, g, unknown, or other
  misc_difference 37: note = a, c, u, g, unknown, or other
  misc_difference 39: note = a, c, u, g, unknown, or other
  misc_difference 40: note = a, c, u, g, unknown, or other
  misc_difference 45: note = a, c, u, g, unknown, or other
  misc_difference 46: note = a, c, u, g, unknown, or other
  misc_difference 47: note = a, c, u, g, unknown, or other
  misc_difference 48: note = a, c, u, g, unknown, or other
  misc_difference 56: note = a, c, u, g, unknown, or other
  misc_difference 57: note = a, c, u, g, unknown, or other
  misc_difference 58: note = a, c, u, g, unknown, or other
  misc_difference 59: note = a, c, u, g, unknown, or other
  misc_difference 60: note = a, c, u, g, unknown, or other
  misc_difference 64: note = a, c, u, g, unknown, or other
  misc_difference 65: note = a, c, u, g, unknown, or other
  misc_difference 66: note = a, c, u, g, unknown, or other
  misc_difference 67: note = a, c, u, g, unknown, or other
  misc_difference 76: note = a, c, u, g, unknown, or other
  misc_difference 77: note = a, c, u, g, unknown, or other
  misc_difference 79: note = a, c, u, g, unknown, or other
  misc_difference 80: note = a, c, u, g, unknown, or other
  misc_difference 81: note = a, c, u, g, unknown, or other
  misc_difference 89: note = a, c, u, g, unknown, or other
  misc_difference 92: note = a, c, u, g, unknown, or other
  misc_difference 111: note = a, c, u, g, unknown, or other
  misc_difference 113: note = a, c, u, g, unknown, or other
  misc_difference 116: note = a, c, u, g, unknown, or other
  misc_difference 117: note = a, c, u, g, unknown, or other
  misc_difference 118: note = a, c, u, g, unknown, or other
  misc_difference 120: note = a, c, u, g, unknown, or other
  misc_difference 121: note = a, c, u, g, unknown, or other
  misc_difference 122: note = a, c, u, g, unknown, or other
  misc_difference 128: note = a, c, u, g, unknown, or other
  misc_difference 129: note = a, c, u, g, unknown, or other
  misc_difference 137: note = a, c, u, g, unknown, or other
  misc_difference 141: note = a, c, u, g, unknown, or other
  misc_difference 143: note = a, c, u, g, unknown, or other
  misc_difference 144: note = a, c, u, g, unknown, or other
  misc_difference 147: note = a, c, u, g, unknown, or other
  misc_difference 152: note = a, c, u, g, unknown, or other
  misc_difference 157: note = a, c, u, g, unknown, or other
  misc_difference 160: note = a, c, u, g, unknown, or other
  misc_difference 161: note = a, c, u, g, unknown, or other
  misc_difference 164: note = a, c, u, g, unknown, or other
  misc_difference 166: note = a, c, u, g, unknown, or other
nnnnnrrtyyggyrnnrnnyrygyagccygnnnnnynynngggynnnnagcccgynnnnnagcnnnnrgcgcryrnnynnnrcyrytynyynrrarcccgracrgttgyyngnrynnnannncgyatnnrcaaggangggnrnnrangarynygycnrrnnyrnyn

SEQ ID NO: 795493 - RNA, 217 nt, unidentified
  source 1..217: mol_type = unassigned RNA; note = ISMex29
  misc_difference 1: note = a, c, u, g, unknown, or other
  misc_difference 2: note = a, c, u, g, unknown, or other
  misc_difference 3: note = a, c, u, g, unknown, or other
  misc_difference 5: note = a, c, u, g, unknown, or other
  misc_difference 6: note = a, c, u, g, unknown, or other
  misc_difference 7: note = a, c, u, g, unknown, or other
  misc_difference 10: note = a, c, u, g, unknown, or other
  misc_difference 11: note = a, c, u, g, unknown, or other
  misc_difference 16: note = a, c, u, g, unknown, or other
  misc_difference 17: note = a, c, u, g, unknown, or other
  misc_difference 18: note = a, c, u, g, unknown, or other
  misc_difference 20: note = a, c, u, g, unknown, or other
  misc_difference 21: note = a, c, u, g, unknown, or other
  misc_difference 23: note = a, c, u, g, unknown, or other
  misc_difference 30: note = a, c, u, g, unknown, or other
  misc_difference 31: note = a, c, u, g, unknown, or other
  misc_difference 32: note = a, c, u, g, unknown, or other
  misc_difference 40: note = a, c, u, g, unknown, or other
  misc_difference 42: note = a, c, u, g, unknown, or other
  misc_difference 43: note = a, c, u, g, unknown, or other
  misc_difference 44: note = a, c, u, g, unknown, or other
  misc_difference 48: note = a, c, u, g, unknown, or other
  misc_difference 49: note = a, c, u, g, unknown, or other
  misc_difference 51: note = a, c, u, g, unknown, or other
  misc_difference 53: note = a, c, u, g, unknown, or other
  misc_difference 54: note = a, c, u, g, unknown, or other
  misc_difference 56: note = a, c, u, g, unknown, or other
  misc_difference 58: note = a, c, u, g, unknown, or other
  misc_difference 59: note = a, c, u, g, unknown, or other
  misc_difference 61: note = a, c, u, g, unknown, or other
  misc_difference 64: note = a, c, u, g, unknown, or other
  misc_difference 66: note = a, c, u, g, unknown, or other
  misc_difference 67: note = a, c, u, g, unknown, or other
  misc_difference 68: note = a, c, u, g, unknown, or other
  misc_difference 72: note = a, c, u, g, unknown, or other
  misc_difference 73: note = a, c, u, g, unknown, or other
  misc_difference 74: note = a, c, u, g, unknown, or other
  misc_difference 75: note = a, c, u, g, unknown, or other
  misc_difference 76: note = a, c, u, g, unknown, or other
  misc_difference 78: note = a, c, u, g, unknown, or other
  misc_difference 79: note = a, c, u, g, unknown, or other
  misc_difference 81: note = a, c, u, g, unknown, or other
  misc_difference 82: note = a, c, u, g, unknown, or other
  misc_difference 83: note = a, c, u, g, unknown, or other
  misc_difference 84: note = a, c, u, g, unknown, or other
  misc_difference 85: note = a, c, u, g, unknown, or other
  misc_difference 86: note = a, c, u, g, unknown, or other
  misc_difference 87: note = a, c, u, g, unknown, or other
  misc_difference 90: note = a, c, u, g, unknown, or other
  misc_difference 91: note = a, c, u, g, unknown, or other
  misc_difference 92: note = a, c, u, g, unknown, or other
  misc_difference 93: note = a, c, u, g, unknown, or other
  misc_difference 94: note = a, c, u, g, unknown, or other
  misc_difference 99: note = a, c, u, g, unknown, or other
  misc_difference 100: note = a, c, u, g, unknown, or other
  misc_difference 102: note = a, c, u, g, unknown, or other
  misc_difference 104: note = a, c, u, g, unknown, or other
  misc_difference 105: note = a, c, u, g, unknown, or other
  misc_difference 111: note = a, c, u, g, unknown, or other
  misc_difference 118: note = a, c, u, g, unknown, or other
  misc_difference 126: note = a, c, u, g, unknown, or other
  misc_difference 130: note = a, c, u, g, unknown, or other
  misc_difference 131: note = a, c, u, g, unknown, or other
  misc_difference 137: note = a, c, u, g, unknown, or other
  misc_difference 139: note = a, c, u, g, unknown, or other
  misc_difference 140: note = a, c, u, g, unknown, or other
  misc_difference 141: note = a, c, u, g, unknown, or other
  misc_difference 142: note = a, c, u, g, unknown, or other
  misc_difference 143: note = a, c, u, g, unknown, or other
  misc_difference 150: note = a, c, u, g, unknown, or other
  misc_difference 151: note = a, c, u, g, unknown, or other
  misc_difference 152: note = a, c, u, g, unknown, or other
  misc_difference 153: note = a, c, u, g, unknown, or other
  misc_difference 154: note = a, c, u, g, unknown, or other
  misc_difference 156: note = a, c, u, g, unknown, or other
  misc_difference 164: note = a, c, u, g, unknown, or other
  misc_difference 165: note = a, c, u, g, unknown, or other
  misc_difference 171: note = a, c, u, g, unknown, or other
  misc_difference 175: note = a, c, u, g, unknown, or other
  misc_difference 176: note = a, c, u, g, unknown, or other
  misc_difference 183: note = a, c, u, g, unknown, or other
  misc_difference 184: note = a, c, u, g, unknown, or other
  misc_difference 188: note = a, c, u, g, unknown, or other
  misc_difference 190: note = a, c, u, g, unknown, or other
  misc_difference 191: note = a, c, u, g, unknown, or other
  misc_difference 192: note = a, c, u, g, unknown, or other
  misc_difference 194: note = a, c, u, g, unknown, or other
  misc_difference 195: note = a, c, u, g, unknown, or other
  misc_difference 197: note = a, c, u, g, unknown, or other
  misc_difference 198: note = a, c, u, g, unknown, or other
  misc_difference 199: note = a, c, u, g, unknown, or other
  misc_difference 200: note = a, c, u, g, unknown, or other
  misc_difference 201: note = a, c, u, g, unknown, or other
  misc_difference 202: note = a, c, u, g, unknown, or other
  misc_difference 203: note = a, c, u, g, unknown, or other
  misc_difference 207: note = a, c, u, g, unknown, or other
  misc_difference 210: note = a, c, u, g, unknown, or other
  misc_difference 211: note = a, c, u, g, unknown, or other
  misc_difference 212: note = a, c, u, g, unknown, or other
  misc_difference 213: note = a, c, u, g, unknown, or other
  misc_difference 214: note = a, c, u, g, unknown, or other
nnnrnnngynngggynnnrnnrnrtratgnnnrryygrynrnnnyyrnnrnrnngnrnnrnccnrnnnrrynnnnngnnynnnnnnncgnnnnnytgrnngnrnnyygrynygcgrrnyycatyrnggcnngcrgynrnnnnnrcygcrnnnnnangcyrraynnrygrcngcrnncrryyrnnygynrnnnynnynnnnnnnycyngynnnnnrrr

SEQ ID NO: 795494 - RNA, 281 nt, unidentified
  source 1..281: mol_type = unassigned RNA; note = ISDha12
  misc_difference 1: note = a, c, u, g, unknown, or other
  misc_difference 2: note = a, c, u, g, unknown, or other
  misc_difference 3: note = a, c, u, g, unknown, or other
  misc_difference 4: note = a, c, u, g, unknown, or other
  misc_difference 5: note = a, c, u, g, unknown, or other
  misc_difference 7: note = a, c, u, g, unknown, or other
  misc_difference 8: note = a, c, u, g, unknown, or other
  misc_difference 9: note = a, c, u, g, unknown, or other
  misc_difference 10: note = a, c, u, g, unknown, or other
  misc_difference 11: note = a, c, u, g, unknown, or other
  misc_difference 12: note = a, c, u, g, unknown, or other
  misc_difference 13: note = a, c, u, g, unknown, or other
  misc_difference 14: note = a, c, u, g, unknown, or other
  misc_difference 15: note = a, c, u, g, unknown, or other
  misc_difference 17: note = a, c, u, g, unknown, or other
  misc_difference 18: note = a, c, u, g, unknown, or other
  misc_difference 19: note = a, c, u, g, unknown, or other
  misc_difference 21: note = a, c, u, g, unknown, or other
  misc_difference 22: note = a, c, u, g, unknown, or other
  misc_difference 23: note = a, c, u, g, unknown, or other
  misc_difference 24: note = a, c, u, g, unknown, or other
  misc_difference 25: note = a, c, u, g, unknown, or other
  misc_difference 26: note = a, c, u, g, unknown, or other
  misc_difference 27: note = a, c, u, g, unknown, or other
  misc_difference 28: note = a, c, u, g, unknown, or other
  misc_difference 29: note = a, c, u, g, unknown, or other
  misc_difference 30: note = a, c, u, g, unknown, or other
  misc_difference 31: note = a, c, u, g, unknown, or other
  misc_difference 32: note = a, c, u, g, unknown, or other
  misc_difference 34: note = a, c, u, g, unknown, or other
  misc_difference 35: note = a, c, u, g, unknown, or other
  misc_difference 36: note = a, c, u, g, unknown, or other
  misc_difference 37: note = a, c, u, g, unknown, or other
  misc_difference 38: note = a, c, u, g, unknown, or other
  misc_difference 39: note = a, c, u, g, unknown, or other
  misc_difference 42: note = a, c, u, g, unknown, or other
  misc_difference 44: note = a, c, u, g, unknown, or other
  misc_difference 46: note = a, c, u, g, unknown, or other
  misc_difference 52: note = a, c, u, g, unknown, or other
  misc_difference 53: note = a, c, u, g, unknown, or other
  misc_difference 54: note = a, c, u, g, unknown, or other
  misc_difference 55: note = a, c, u, g, unknown, or other
  misc_difference 56: note = a, c, u, g, unknown, or other
  misc_difference 58: note = a, c, u, g, unknown, or other
  misc_difference 62: note = a, c, u, g, unknown, or other
  misc_difference 64: note = a, c, u, g, unknown, or other
  misc_difference 65: note = a, c, u, g, unknown, or other
  misc_difference 74: note = a, c, u, g, unknown, or other
  misc_difference 77: note = a, c, u, g, unknown, or other
  misc_difference 78: note = a, c, u, g, unknown, or other
  misc_difference 83: note = a, c, u, g, unknown, or other
  misc_difference 86: note = a, c, u, g, unknown, or other
  misc_difference 87: note = a, c, u, g, unknown, or other
  misc_difference 90: note = a, c, u, g, unknown, or other
  misc_difference 91: note = a, c, u, g, unknown, or other
  misc_difference 104: note = a, c, u, g, unknown, or other
  misc_difference 105: note = a, c, u, g, unknown, or other
  misc_difference 106: note = a, c, u, g, unknown, or other
  misc_difference 107: note = a, c, u, g, unknown, or other
  misc_difference 108: note = a, c, u, g, unknown, or other
  misc_difference 112: note = a, c, u, g, unknown, or other
  misc_difference 115: note = a, c, u, g, unknown, or other
  misc_difference 116: note = a, c, u, g, unknown, or other
  misc_difference 117: note = a, c, u, g, unknown, or other
  misc_difference 118: note = a, c, u, g, unknown, or other
  misc_difference 122: note = a, c, u, g, unknown, or other
  misc_difference 123: note = a, c, u, g, unknown, or other
  misc_difference 128: note = a, c, u, g, unknown, or other
  misc_difference 132: note = a, c, u, g, unknown, or other
  misc_difference 133: note = a, c, u, g, unknown, or other
  misc_difference 135: note = a, c, u, g, unknown, or other
  misc_difference 136: note = a, c, u, g, unknown, or other
  misc_difference 138: note = a, c, u, g, unknown, or other
  misc_difference 139: note = a, c, u, g, unknown, or other
  misc_difference 142: note = a, c, u, g, unknown, or other
  misc_difference 144: note = a, c, u, g, unknown, or other
  misc_difference 145: note = a, c, u, g, unknown, or other
  misc_difference 146: note = a, c, u, g, unknown, or other
  misc_difference 153: note = a, c, u, g, unknown, or other
  misc_difference 156: note = a, c, u, g, unknown, or other
  misc_difference 160: note = a, c, u, g, unknown, or other
  misc_difference 167: note = a, c, u, g, unknown, or other
  misc_difference 169: note = a, c, u, g, unknown, or other
  misc_difference 170: note = a, c, u, g, unknown, or other
  misc_difference 173: note = a, c, u, g, unknown, or other
  misc_difference 174: note = a, c, u, g, unknown, or other
  misc_difference 175: note = a, c, u, g, unknown, or other
  misc_difference 176: note = a, c, u, g, unknown, or other
  misc_difference 177: note = a, c, u, g, unknown, or other
  misc_difference 178: note = a, c, u, g, unknown, or other
  misc_difference 179: note = a, c, u, g, unknown, or other
  misc_difference 180: note = a, c, u, g, unknown, or other
  misc_difference 181: note = a, c, u, g, unknown, or other
  misc_difference 182: note = a, c, u, g, unknown, or other
  misc_difference 183: note = a, c, u, g, unknown, or other
  misc_difference 185: note = a, c, u, g, unknown, or other
  misc_difference 186: note = a, c, u, g, unknown, or other
  misc_difference 187: note = a, c, u, g, unknown, or other
  misc_difference 196: note = a, c, u, g, unknown, or other
  misc_difference 197: note = a, c, u, g, unknown, or other
  misc_difference 198: note = a, c, u, g, unknown, or other
  misc_difference 199: note = a, c, u, g, unknown, or other
  misc_difference 201: note = a, c, u, g, unknown, or other
  misc_difference 202: note = a, c, u, g, unknown, or other
  misc_difference 203: note = a, c, u, g, unknown, or other
  misc_difference 204: note = a, c, u, g, unknown, or other
  misc_difference 205: note = a, c, u, g, unknown, or other
  misc_difference 206: note = a, c, u, g, unknown, or other
  misc_difference 207: note = a, c, u, g, unknown, or other
  misc_difference 208: note = a, c, u, g, unknown, or other
  misc_difference 209: note = a, c, u, g, unknown, or other
  misc_difference 210: note = a, c, u, g, unknown, or other
  misc_difference 211: note = a, c, u, g, unknown, or other
  misc_difference 212: note = a, c, u, g, unknown, or other
  misc_difference 214: note = a, c, u, g, unknown, or other
  misc_difference 217: note = a, c, u, g, unknown, or other
  misc_difference 219: note = a, c, u, g, unknown, or other
  misc_difference 223: note = a, c, u, g, unknown, or other
  misc_difference 226: note = a, c, u, g, unknown, or other
  misc_difference 229: note = a, c, u, g, unknown, or other
  misc_difference 230: note = a, c, u, g, unknown, or other
  misc_difference 243: note = a, c, u, g, unknown, or other
  misc_difference 244: note = a, c, u, g, unknown, or other
  misc_difference 245: note = a, c, u, g, unknown, or other
  misc_difference 246: note = a, c, u, g, unknown, or other
  misc_difference 250: note = a, c, u, g, unknown, or other
  misc_difference 251: note = a, c, u, g, unknown, or other
  misc_difference 252: note = a, c, u, g, unknown, or other
  misc_difference 253: note = a, c, u, g, unknown, or other
  misc_difference 254: note = a, c, u, g, unknown, or other
  misc_difference 255: note = a, c, u, g, unknown, or other
  misc_difference 258: note = a, c, u, g, unknown, or other
  misc_difference 264: note = a, c, u, g, unknown, or other
  misc_difference 265: note = a, c, u, g, unknown, or other
  misc_difference 270: note = a, c, u, g, unknown, or other
  misc_difference 272: note = a, c, u, g, unknown, or other
  misc_difference 273: note = a, c, u, g, unknown, or other
  misc_difference 275: note = a, c, u, g, unknown, or other
  misc_difference 278: note = a, c, u, g, unknown, or other
  misc_difference 279: note = a, c, u, g, unknown, or other
  misc_difference 280: note = a, c, u, g, unknown, or other
  misc_difference 281: note = a, c, u, g, unknown, or other
nnnnnrnnnnnnnnnynnnynnnnnnnnnnnnynnnnnnyynrnrnyryyynnnnnanrrtnrnnyyrrrryynrtnnrggrnarnnctnnyycyycytgyrrnnnnnacynctnnnnragnntgyyncccnnrnnynnrynynnnryttcynacncgynrgytgynynnyynnnnnnnnnnnynnnyryagcagnnnnrnnnnnnnnnnnnynrgnynagtnctnatnnrcgaggytgyygnnnnryynnnnnnyynrggrynnyyyrnrnnrnyynnnn

SEQ ID NO: 795495 - RNA, 381 nt, unidentified
  source 1..381: mol_type = unassigned RNA; note = ISGsu4
  misc_difference 4: note = a, c, u, g, unknown, or other
  misc_difference 5: note = a, c, u, g, unknown, or other
  misc_difference 6: note = a, c, u, g, unknown, or other
  misc_difference 10: note = a, c, u, g, unknown, or other
  misc_difference 19: note = a, c, u, g, unknown, or other
  misc_difference 27: note = a, c, u, g, unknown, or other
  misc_difference 39: note = a, c, u, g, unknown, or other
  misc_difference 40: note = a, c, u, g, unknown, or other
  misc_difference 41: note = a, c, u, g, unknown, or other
  misc_difference 43: note = a, c, u, g, unknown, or other
  misc_difference 44: note = a, c, u, g, unknown, or other
  misc_difference 45: note = a, c, u, g, unknown, or other
  misc_difference 49: note = a, c, u, g, unknown, or other
  misc_difference 50: note = a, c, u, g, unknown, or other
  misc_difference 58: note = a, c, u, g, unknown, or other
  misc_difference 59: note = a, c, u, g, unknown, or other
  misc_difference 60: note = a, c, u, g, unknown, or other
  misc_difference 61: note = a, c, u, g, unknown, or other
  misc_difference 62: note = a, c, u, g, unknown, or other
  misc_difference 63: note = a, c, u, g, unknown, or other
  misc_difference 65: note = a, c, u, g, unknown, or other
  misc_difference 68: note = a, c, u, g, unknown, or other
  misc_difference 70: note = a, c, u, g, unknown, or other
  misc_difference 71: note = a, c, u, g, unknown, or other
  misc_difference 72: note = a, c, u, g, unknown, or other
  misc_difference 73: note = a, c, u, g, unknown, or other
  misc_difference 74: note = a, c, u, g, unknown, or other
  misc_difference 75: note = a, c, u, g, unknown, or other
  misc_difference 76: note = a, c, u, g, unknown, or other
  misc_difference 77: note = a, c, u, g, unknown, or other
  misc_difference 78: note = a, c, u, g, unknown, or other
  misc_difference 83: note = a, c, u, g, unknown, or other
  misc_difference 85: note = a, c, u, g, unknown, or other
  misc_difference 86: note = a, c, u, g, unknown, or other
  misc_difference 87: note = a, c, u, g, unknown, or other
  misc_difference 90: note = a, c, u, g, unknown, or other
  misc_difference 94: note = a, c, u, g, unknown, or other
  misc_difference 95: note = a, c, u, g, unknown, or other
  misc_difference 96: note = a, c, u, g, unknown, or other
  misc_difference 97: note = a, c, u, g, unknown, or other
  misc_difference 99: note = a, c, u, g, unknown, or other
  misc_difference 101: note = a, c, u, g, unknown, or other
  misc_difference 102: note = a, c, u, g, unknown, or other
  misc_difference 104: note = a, c, u, g, unknown, or other
  misc_difference 106: note = a, c, u, g, unknown, or other
  misc_difference 111: note = a, c, u, g, unknown, or other
  misc_difference 112: note = a, c, u, g, unknown, or other
  misc_difference 113: note = a, c, u, g, unknown, or other
  misc_difference 114: note = a, c, u, g, unknown, or other
  misc_difference 115: note = a, c, u, g, unknown, or other
  misc_difference 119: note = a, c, u, g, unknown, or other
  misc_difference 121: note = a, c, u, g, unknown, or other
  misc_difference 122: note = a, c, u, g, unknown, or other
  misc_difference 123: note = a, c, u, g, unknown, or other
  misc_difference 126: note = a, c, u, g, unknown, or other
  misc_difference 127: note = a, c, u, g, unknown, or other
  misc_difference 128: note = a, c, u, g, unknown, or other
  misc_difference 129: note = a, c, u, g, unknown, or other
  misc_difference 131: note = a, c, u, g, unknown, or other
  misc_difference 132: note = a, c, u, g, unknown, or other
  misc_difference 143: note = a, c, u, g, unknown, or other
  misc_difference 151: note = a, c, u, g, unknown, or other
  misc_difference 152: note = a, c, u, g, unknown, or other
  misc_difference 157: note = a, c, u, g, unknown, or other
  misc_difference 158: note = a, c, u, g, unknown, or other
  misc_difference 159: note = a, c, u, g, unknown, or other
  misc_difference 160: note = a, c, u, g, unknown, or other
  misc_difference 161: note = a, c, u, g, unknown, or other
  misc_difference 162: note = a, c, u, g, unknown, or other
  misc_difference 163: note = a, c, u, g, unknown, or other
  misc_difference 164: note = a, c, u, g, unknown, or other
  misc_difference 165: note = a, c, u, g, unknown, or other
  misc_difference 166: note = a, c, u, g, unknown, or other
  misc_difference 167: note = a, c, u, g, unknown, or other
  misc_difference 171: note = a, c, u, g, unknown, or other
  misc_difference 172: note = a, c, u, g, unknown, or other
  misc_difference 173: note = a, c, u, g, unknown, or other
  misc_difference 174: note = a, c, u, g, unknown, or other
  misc_difference 179: note = a, c, u, g, unknown, or other
  misc_difference 180: note = a, c, u, g, unknown, or other
  misc_difference 181: note = a, c, u, g, unknown, or other
  misc_difference 182: note = a, c, u, g, unknown, or other
  misc_difference 183: note = a, c, u, g, unknown, or other
  misc_difference 184: note = a, c, u, g, unknown, or other
  misc_difference 185: note = a, c, u, g, unknown, or other
  misc_difference 186: note = a, c, u, g, unknown, or other
  misc_difference 187: note = a, c, u, g, unknown, or other
  misc_difference 188: note = a, c, u, g, unknown, or other
  misc_difference 189: note = a, c, u, g, unknown, or other
  misc_difference 190: note = a, c, u, g, unknown, or other
  misc_difference 192: note = a, c, u, g, unknown, or other
  misc_difference 195: note = a, c, u, g, unknown, or other
  misc_difference 205: note = a, c, u, g, unknown, or other
  misc_difference 216: note = a, c, u, g, unknown, or other
  misc_difference 217: note = a, c, u, g, unknown, or other
  misc_difference 218: note = a, c, u, g, unknown, or other
  misc_difference 227: note = a, c, u, g, unknown, or other
  misc_difference 228: note = a, c, u, g, unknown, or other
  misc_difference 229: note = a, c, u, g, unknown, or other
  misc_difference 230: note = a, c, u, g, unknown, or other
  misc_difference 231: note = a, c, u, g, unknown, or other
  misc_difference 232: note = a, c, u, g, unknown, or other
  misc_difference 234: note = a, c, u, g, unknown, or other
  misc_difference 235: note = a, c, u, g, unknown, or other
  misc_difference 236: note = a, c, u, g, unknown, or other
  misc_difference 237: note = a, c, u, g, unknown, or other
  misc_difference 238: note = a, c, u, g, unknown, or other
  misc_difference 239: note = a, c, u, g, unknown, or other
  misc_difference 240: note = a, c, u, g, unknown, or other
  misc_difference 241: note = a, c, u, g, unknown, or other
  misc_difference 242: note = a, c, u, g, unknown, or other
  misc_difference 247: note = a, c, u, g, unknown, or other
  misc_difference 248: note = a, c, u, g, unknown, or other
  misc_difference 249: note = a, c, u, g, unknown, or other
  misc_difference 250: note = a, c, u, g, unknown, or other
  misc_difference 251: note = a, c, u, g, unknown, or other
  misc_difference 253: note = a, c, u, g, unknown, or other
  misc_difference 258: note = a, c, u, g, unknown, or other
  misc_difference 259: note = a, c, u, g, unknown, or other
  misc_difference 263: note = a, c, u, g, unknown, or other
  misc_difference 275: note = a, c, u, g, unknown, or other
  misc_difference 278: note = a, c, u, g, unknown, or other
  misc_difference 280: note = a, c, u, g, unknown, or other
  misc_difference 281: note = a, c, u, g, unknown, or other
  misc_difference 282: note = a, c, u, g, unknown, or other
  misc_difference 283: note = a, c, u, g, unknown, or other
  misc_difference 293: note = a, c, u, g, unknown, or other
  misc_difference 299: note = a, c, u, g, unknown, or other
  misc_difference 301: note = a, c, u, g, unknown, or other
  misc_difference 302: note = a, c, u, g, unknown, or other
  misc_difference 303: note = a, c, u, g, unknown, or other
  misc_difference 304: note = a, c, u, g, unknown, or other
  misc_difference 305: note = a, c, u, g, unknown, or other
  misc_difference 306: note = a, c, u, g, unknown, or other
  misc_difference 307: note = a, c, u, g, unknown, or other
  misc_difference 308: note = a, c, u, g, unknown, or other
  misc_difference 310: note = a, c, u, g, unknown, or other
  misc_difference 315: note = a, c, u, g, unknown, or other
  misc_difference 320: note = a, c, u, g, unknown, or other
  misc_difference 322: note = a, c, u, g, unknown, or other
  misc_difference 323: note = a, c, u, g, unknown, or other
  misc_difference 324: note = a, c, u, g, unknown, or other
  misc_difference 325: note = a, c, u, g, unknown, or other
  misc_difference 326: note = a, c, u, g, unknown, or other
  misc_difference 327: note = a, c, u, g, unknown, or other
  misc_difference 328: note = a, c, u, g, unknown, or other
  misc_difference 329: note = a, c, u, g, unknown, or other
  misc_difference 331: note = a, c, u, g, unknown, or other
  misc_difference 332: note = a, c, u, g, unknown, or other
  misc_difference 334: note = a, c, u, g, unknown, or other
  misc_difference 335: note = a, c, u, g, unknown, or other
  misc_difference 336: note = a, c, u, g, unknown, or other
  misc_difference 337: note = a, c, u, g, unknown, or other
  misc_difference 339: note = a, c, u, g, unknown, or other
  misc_difference 340: note = a, c, u, g, unknown, or other
  misc_difference 341: note = a, c, u, g, unknown, or other
  misc_difference 344: note = a, c, u, g, unknown, or other
  misc_difference 367: note = a, c, u, g, unknown, or other
  misc_difference 368: note = a, c, u, g, unknown, or other
  misc_difference 369: note = a, c, u, g, unknown, or other
  misc_difference 370: note = a, c, u, g, unknown, or other
  misc_difference 371: note = a, c, u, g, unknown, or other
  misc_difference 372: note = a, c, u, g, unknown, or other
  misc_difference 373: note = a, c, u, g, unknown, or other
  misc_difference 374: note = a, c, u, g, unknown, or other
  misc_difference 375: note = a, c, u, g, unknown, or other
trrnnngrrnrgrryggrnragccygnygyctaactggnnncnnnggrnnragcyyrnnnnnnrnrynynnnnnnnnntgygncnnngancrcnnnnrnrnnyntnrryynnnnncccngnnncynnnnynnttgattggaynyycryycnngctcnnnnnnnnnnnryrnnnnryyrnnnnnnnnnnnnrngynctgcccctyncccgarccygnnnyyaactggnnnnnnynnnnnnnnnarccnnnnnynttgannrggncggyaygagggnacnrnnnnrtttctaggncgyrrnrnnnnnnnnynyyrcnryyrnynnnnnnnnynnynnnnrnnngancctcratargtgtttggtgcagnnnnnnnnnyygyrc

SEQ ID NO: 795496 - RNA, 214 nt, unidentified
  source 1..214: mol_type = unassigned RNA; note = ISSpi6
  misc_difference 1: note = a, c, u, g, unknown, or other
  misc_difference 2: note = a, c, u, g, unknown, or other
  misc_difference 3: note = a, c, u, g, unknown, or other
  misc_difference 4: note = a, c, u, g, unknown, or other
  misc_difference 5: note = a, c, u, g, unknown, or other
  misc_difference 12: note = a, c, u, g, unknown, or other
  misc_difference 13: note = a, c, u, g, unknown, or other
  misc_difference 14: note = a, c, u, g, unknown, or other
  misc_difference 16: note = a, c, u, g, unknown, or other
  misc_difference 18: note = a, c, u, g, unknown, or other
  misc_difference 19: note = a, c, u, g, unknown, or other
  misc_difference 20: note = a, c, u, g, unknown, or other
  misc_difference 21: note = a, c, u, g, unknown, or other
  misc_difference 22: note = a, c, u, g, unknown, or other
  misc_difference 29: note = a, c, u, g, unknown, or other
  misc_difference 30: note = a, c, u, g, unknown, or other
  misc_difference 31: note = a, c, u, g, unknown, or other
  misc_difference 34: note = a, c, u, g, unknown, or other
  misc_difference 38: note = a, c, u, g, unknown, or other
  misc_difference 39: note = a, c, u, g, unknown, or other
  misc_difference 41: note = a, c, u, g, unknown, or other
  misc_difference 43: note = a, c, u, g, unknown, or other
  misc_difference 46: note = a, c, u, g, unknown, or other
  misc_difference 47: note = a, c, u, g, unknown, or other
  misc_difference 48: note = a, c, u, g, unknown, or other
  misc_difference 49: note = a, c, u, g, unknown, or other
  misc_difference 51: note = a, c, u, g, unknown, or other
  misc_difference 53: note = a, c, u, g, unknown, or other
  misc_difference 54: note = a, c, u, g, unknown, or other
  misc_difference 61: note = a, c, u, g, unknown, or other
  misc_difference 62: note = a, c, u, g, unknown, or other
  misc_difference 63: note = a, c, u, g, unknown, or other
  misc_difference 64: note = a, c, u, g, unknown, or other
  misc_difference 65: note = a, c, u, g, unknown, or other
  misc_difference 66: note = a, c, u, g, unknown, or other
  misc_difference 67: note = a, c, u, g, unknown, or other
  misc_difference 68: note = a, c, u, g, unknown, or other
  misc_difference 69: note = a, c, u, g, unknown, or other
  misc_difference 70: note = a, c, u, g, unknown, or other
  misc_difference 75: note = a, c, u, g, unknown, or other
  misc_difference 76: note = a, c, u, g, unknown, or other
  misc_difference 77: note = a, c, u, g, unknown, or other
  misc_difference 78: note = a, c, u, g, unknown, or other
  misc_difference 79: note = a, c, u, g, unknown, or other
  misc_difference 82: note = a, c, u, g, unknown, or other
  misc_difference 86: note = a, c, u, g, unknown, or other
  misc_difference 87: note = a, c, u, g, unknown, or other
  misc_difference 88: note = a, c, u, g, unknown, or other
  misc_difference 89: note = a, c, u, g, unknown, or other
  misc_difference 90: note = a, c, u, g, unknown, or other
  misc_difference 91: note = a, c, u, g, unknown, or other
  misc_difference 92: note = a, c, u, g, unknown, or other
  misc_difference 94: note = a, c, u, g, unknown, or other
  misc_difference 95: note = a, c, u, g, unknown, or other
  misc_difference 101: note = a, c, u, g, unknown, or other
  misc_difference 103: note = a, c, u, g, unknown, or other
  misc_difference 105: note = a, c, u, g, unknown, or other
  misc_difference 106: note = a, c, u, g, unknown, or other
  misc_difference 107: note = a, c, u, g, unknown, or other
  misc_difference 108: note = a, c, u, g, unknown, or other
  misc_difference 115: note = a, c, u, g, unknown, or other
  misc_difference 116: note = a, c, u, g, unknown, or other
  misc_difference 124: note = a, c, u, g, unknown, or other
  misc_difference 127: note = a, c, u, g, unknown, or other
  misc_difference 128: note = a, c, u, g, unknown, or other
  misc_difference 133: note = a, c, u, g, unknown, or other
  misc_difference 134: note = a, c, u, g, unknown, or other
  misc_difference 135: note = a, c, u, g, unknown, or other
  misc_difference 136: note = a, c, u, g, unknown, or other
  misc_difference 137: note = a, c, u, g, unknown, or other
  misc_difference 138: note = a, c, u, g, unknown, or other
  misc_difference 139: note = a, c, u, g, unknown, or other
  misc_difference 140: note = a, c, u, g, unknown, or other
  misc_difference 141: note = a, c, u, g, unknown, or other
  misc_difference 146: note = a, c, u, g, unknown, or other
  misc_difference 147: note = a, c, u, g, unknown, or other
  misc_difference 148: note = a, c, u, g, unknown, or other
  misc_difference 149: note = a, c, u, g, unknown, or other
  misc_difference 150: note = a, c, u, g, unknown, or other
  misc_difference 151: note = a, c, u, g, unknown, or other
  misc_difference 158: note = a, c, u, g, unknown, or other
  misc_difference 159: note = a, c, u, g, unknown, or other
  misc_difference 162: note = a, c, u, g, unknown, or other
  misc_difference 163: note = a, c, u, g, unknown, or other
  misc_difference 164: note = a, c, u, g, unknown, or other
  misc_difference 170: note = a, c, u, g, unknown, or other
  misc_difference 173: note = a, c, u, g, unknown, or other
  misc_difference 174: note = a, c, u, g, unknown, or other
  misc_difference 175: note = a, c, u, g, unknown, or other
  misc_difference 176: note = a, c, u, g, unknown, or other
  misc_difference 177: note = a, c, u, g, unknown, or other
  misc_difference 178: note = a, c, u, g, unknown, or other
  misc_difference 179: note = a, c, u, g, unknown, or other
  misc_difference 181: note = a, c, u, g, unknown, or other
  misc_difference 183: note = a, c, u, g, unknown, or other
  misc_difference 186: note = a, c, u, g, unknown, or other
  misc_difference 187: note = a, c, u, g, unknown, or other
  misc_difference 188: note = a, c, u, g, unknown, or other
  misc_difference 189: note = a, c, u, g, unknown, or other
  misc_difference 190: note = a, c, u, g, unknown, or other
  misc_difference 191: note = a, c, u, g, unknown, or other
  misc_difference 192: note = a, c, u, g, unknown, or other
  misc_difference 193: note = a, c, u, g, unknown, or other
  misc_difference 194: note = a, c, u, g, unknown, or other
  misc_difference 195: note = a, c, u, g, unknown, or other
  misc_difference 200: note = a, c, u, g, unknown, or other
  misc_difference 202: note = a, c, u, g, unknown, or other
  misc_difference 203: note = a, c, u, g, unknown, or other
  misc_difference 204: note = a, c, u, g, unknown, or other
  misc_difference 205: note = a, c, u, g, unknown, or other
  misc_difference 206: note = a, c, u, g, unknown, or other
  misc_difference 207: note = a, c, u, g, unknown, or other
  misc_difference 208: note = a, c, u, g, unknown, or other
  misc_difference 210: note = a, c, u, g, unknown, or other
  misc_difference 211: note = a, c, u, g, unknown, or other
  misc_difference 212: note = a, c, u, g, unknown, or other
  misc_difference 213: note = a, c, u, g, unknown, or other
  misc_difference 214: note = a, c, u, g, unknown, or other
nnnnnytgyrrnnnynrnnnnngatgrynnnaanrgynnrnynrcnnnnynrnnrrcctgnnnnnnnnnnyrrynnnnnrrnryynnnnnnntnnyrrgrnynrnnnngygcrrnnyycatyrnrgnnyrrrnnnnnnnnnyyyrnnnnnncygratnnrynnnyrcarnyynnnnnnnynrnyrnnnnnnnnnnttgcnrnnnnnnnrnnnnn

SEQ ID NO: 795497 - RNA, 212 nt, unidentified
  source 1..212: mol_type = unassigned RNA; note = ISMysp1
  misc_difference 1: note = a, c, u, g, unknown, or other
  misc_difference 2: note = a, c, u, g, unknown, or other
  misc_difference 3: note = a, c, u, g, unknown, or other
  misc_difference 4: note = a, c, u, g, unknown, or other
  misc_difference 5: note = a, c, u, g, unknown, or other
  misc_difference 6: note = a, c, u, g, unknown, or other
  misc_difference 7: note = a, c, u, g, unknown, or other
  misc_difference 10: note = a, c, u, g, unknown, or other
  misc_difference 13: note = a, c, u, g, unknown, or other
  misc_difference 14: note = a, c, u, g, unknown, or other
  misc_difference 15: note = a, c, u, g, unknown, or other
  misc_difference 16: note = a, c, u, g, unknown, or other
  misc_difference 17: note = a, c, u, g, unknown, or other
  misc_difference 19: note = a, c, u, g, unknown, or other
  misc_difference 21: note = a, c, u, g, unknown, or other
  misc_difference 22: note = a, c, u, g, unknown, or other
  misc_difference 23: note = a, c, u, g, unknown, or other
  misc_difference 24: note = a, c, u, g, unknown, or other
  misc_difference 25: note = a, c, u, g, unknown, or other
  misc_difference 28: note = a, c, u, g, unknown, or other
  misc_difference 30: note = a, c, u, g, unknown, or other
  misc_difference 32: note = a, c, u, g, unknown, or other
  misc_difference 33: note = a, c, u, g, unknown, or other
  misc_difference 35: note = a, c, u, g, unknown, or other
  misc_difference 36: note = a, c, u, g, unknown, or other
  misc_difference 37: note = a, c, u, g, unknown, or other
  misc_difference 47: note = a, c, u, g, unknown, or other
  misc_difference 61: note = a, c, u, g, unknown, or other
  misc_difference 62: note = a, c, u, g, unknown, or other
  misc_difference 65: note = a, c, u, g, unknown, or other
  misc_difference 66: note = a, c, u, g, unknown, or other
  misc_difference 67: note = a, c, u, g, unknown, or other
  misc_difference 68: note = a, c, u, g, unknown, or other
  misc_difference 69: note = a, c, u, g, unknown, or other
  misc_difference 71: note = a, c, u, g, unknown, or other
  misc_difference 75: note = a, c, u, g, unknown, or other
  misc_difference 76: note = a, c, u, g, unknown, or other
  misc_difference 77: note = a, c, u, g, unknown, or other
  misc_difference 78: note = a, c, u, g, unknown, or other
  misc_difference 86: note = a, c, u, g, unknown, or other
  misc_difference 87: note = a, c, u, g, unknown, or other
  misc_difference 88: note = a, c, u, g, unknown, or other
  misc_difference 89: note = a, c, u, g, unknown, or other
  misc_difference 90: note = a, c, u, g, unknown, or other
  misc_difference 92: note = a, c, u, g, unknown, or other
  misc_difference 93: note = a, c, u, g, unknown, or other
  misc_difference 106: note = a, c, u, g, unknown, or other
  misc_difference 111: note = a, c, u, g, unknown, or other
  misc_difference 112: note = a, c, u, g, unknown, or other
  misc_difference 117: note = a, c, u, g, unknown, or other
  misc_difference 136: note = a, c, u, g, unknown, or other
  misc_difference 137: note = a, c, u, g, unknown, or other
  misc_difference 143: note = a, c, u, g, unknown, or other
  misc_difference 144: note = a, c, u, g, unknown, or other
  misc_difference 145: note = a, c, u, g, unknown, or other
  misc_difference 154: note = a, c, u, g, unknown, or other
  misc_difference 155: note = a, c, u, g, unknown, or other
  misc_difference 161: note = a, c, u, g, unknown, or other
  misc_difference 162: note = a, c, u, g, unknown, or other
  misc_difference 163: note = a, c, u, g, unknown, or other
  misc_difference 166: note = a, c, u, g, unknown, or other
  misc_difference 183: note = a, c, u, g, unknown, or other
  misc_difference 187: note = a, c, u, g, unknown, or other
  misc_difference 190: note = a, c, u, g, unknown, or other
  misc_difference 191: note = a, c, u, g, unknown, or other
  misc_difference 192: note = a, c, u, g, unknown, or other
  misc_difference 193: note = a, c, u, g, unknown, or other
  misc_difference 194: note = a, c, u, g, unknown, or other
  misc_difference 196: note = a, c, u, g, unknown, or other
  misc_difference 197: note = a, c, u, g, unknown, or other
  misc_difference 198: note = a, c, u, g, unknown, or other
  misc_difference 201: note = a, c, u, g, unknown, or other
  misc_difference 202: note = a, c, u, g, unknown, or other
  misc_difference 203: note = a, c, u, g, unknown, or other
  misc_difference 204: note = a, c, u, g, unknown, or other
  misc_difference 206: note = a, c, u, g, unknown, or other
  misc_difference 207: note = a, c, u, g, unknown, or other
  misc_difference 208: note = a, c, u, g, unknown, or other
nnnnnnnyrnrynnnnnrnynnnnnyangntnnrnnnrcccrggrgnryygggtrtggctnnyrnnnnnyngcynnnnrtggctynnnnngnntggccgcccggynyyycnngacrncycgrcygctrattgrganntgcgrnnnrrtcgctgnntarggnnnygncggcgrggtygtcyrynggrnyrnnnnnrnnnrynnnnrnnnrgrr

SEQ ID NO: 795498 - RNA, 184 nt, unidentified
  source 1..184: mol_type = unassigned RNA; note = ISAzvi12
  misc_difference 1: note = a, c, u, g, unknown, or other
  misc_difference 2: note = a, c, u, g, unknown, or other
  misc_difference 3: note = a, c, u, g, unknown, or other
  misc_difference 4: note = a, c, u, g, unknown, or other
  misc_difference 5: note = a, c, u, g, unknown, or other
  misc_difference 6: note = a, c, u, g, unknown, or other
  misc_difference 7: note = a, c, u, g, unknown, or other
  misc_difference 9: note = a, c, u, g, unknown, or other
  misc_difference 15: note = a, c, u, g, unknown, or other
  misc_difference 16: note = a, c, u, g, unknown, or other
  misc_difference 17: note = a, c, u, g, unknown, or other
  misc_difference 18: note = a, c, u, g, unknown, or other
  misc_difference 20: note = a, c, u, g, unknown, or other
  misc_difference 24: note = a, c, u, g, unknown, or other
  misc_difference 25: note = a, c, u, g, unknown, or other
  misc_difference 27: note = a, c, u, g, unknown, or other
  misc_difference 35: note = a, c, u, g, unknown, or other
  misc_difference 39: note = a, c, u, g, unknown, or other
  misc_difference 40: note = a, c, u, g, unknown, or other
  misc_difference 52: note = a, c, u, g, unknown, or other
  misc_difference 53: note = a, c, u, g, unknown, or other
  misc_difference 54: note = a, c, u, g, unknown, or other
  misc_difference 55: note = a, c, u, g, unknown, or other
  misc_difference 56: note = a, c, u, g, unknown, or other
  misc_difference 63: note = a, c, u, g, unknown, or other
  misc_difference 72: note = a, c, u, g, unknown, or other
  misc_difference 73: note = a, c, u, g, unknown, or other
  misc_difference 74: note = a, c, u, g, unknown, or other
  misc_difference 75: note = a, c, u, g, unknown, or other
  misc_difference 76: note = a, c, u, g, unknown, or other
  misc_difference 87: note = a, c, u, g, unknown, or other
  misc_difference 91: note = a, c, u, g, unknown, or other
  misc_difference 100: note = a, c, u, g, unknown, or other
  misc_difference 101: note = a, c, u, g, unknown, or other
  misc_difference 107: note = a, c, u, g, unknown, or other
  misc_difference 114: note = a, c, u, g, unknown, or other
  misc_difference 118: note = a, c, u, g, unknown, or other
  misc_difference 119: note = a, c, u, g, unknown, or other
  misc_difference 120: note = a, c, u, g, unknown, or other
  misc_difference 121: note = a, c, u, g, unknown, or other
  misc_difference 122: note = a, c, u, g, unknown, or other
  misc_difference 123: note = a, c, u, g, unknown, or other
  misc_difference 124: note = a, c, u, g, unknown, or other
  misc_difference 125: note = a, c, u, g, unknown, or other
  misc_difference 127: note = a, c, u, g, unknown, or other
  misc_difference 132: note = a, c, u, g, unknown, or other
  misc_difference 133: note = a, c, u, g, unknown, or other
  misc_difference 134: note = a, c, u, g, unknown, or other
  misc_difference 135: note = a, c, u, g, unknown, or other
  misc_difference 136: note = a, c, u, g, unknown, or other
  misc_difference 145: note = a, c, u, g, unknown, or other
  misc_difference 152: note = a, c, u, g, unknown, or other
  misc_difference 161: note = a, c, u, g, unknown, or other
  misc_difference 164: note = a, c, u, g, unknown, or other
  misc_difference 165: note = a, c, u, g, unknown, or other
  misc_difference 166: note = a, c, u, g, unknown, or other
  misc_difference 168: note = a, c, u, g, unknown, or other
  misc_difference 173: note = a, c, u, g, unknown, or other
  misc_difference 174: note = a, c, u, g, unknown, or other
  misc_difference 176: note = a, c, u, g, unknown, or other
  misc_difference 177: note = a, c, u, g, unknown, or other
  misc_difference 178: note = a, c, u, g, unknown, or other
  misc_difference 179: note = a, c, u, g, unknown, or other
  misc_difference 180: note = a, c, u, g, unknown, or other
  misc_difference 181: note = a, c, u, g, unknown, or other
  misc_difference 182: note = a, c, u, g, unknown, or other
nnnnnnnynatgrynnnnynggynngnccgrcryngrrnnrrgccgayaacnnnnnygrycynyrrgrycgnnnnnarcgrttggcnycynryrcgcgrnntycatnrtggccngrrnnnnnnnnrnyccannnnnaggccgranatacgrntgcarycgnyynnnrnyryynnrnnnnnnnyr

SEQ ID NO: 795499 - RNA, 227 nt, unidentified
  source 1..227: mol_type = unassigned RNA; note = ISRhosp8
  misc_difference 1: note = a, c, u, g, unknown, or other
  misc_difference 3: note = a, c, u, g, unknown, or other
  misc_difference 5: note = a, c, u, g, unknown, or other
  misc_difference 6: note = a, c, u, g, unknown, or other
  misc_difference 15: note = a, c, u, g, unknown, or other
  misc_difference 16: note = a, c, u, g, unknown, or other
  misc_difference 18: note = a, c, u, g, unknown, or other
  misc_difference 19: note = a, c, u, g, unknown, or other
  misc_difference 20: note = a, c, u, g, unknown, or other
  misc_difference 21: note = a, c, u, g, unknown, or other
  misc_difference 25: note = a, c, u, g, unknown, or other
  misc_difference 27: note = a, c, u, g, unknown, or other
  misc_difference 28: note = a, c, u, g, unknown, or other
  misc_difference 52: note = a, c, u, g, unknown, or other
  misc_difference 53: note = a, c, u, g, unknown, or other
  misc_difference 55: note = a, c, u, g, unknown, or other
  misc_difference 56: note = a, c, u, g, unknown, or other
  misc_difference 61: note = a, c, u, g, unknown, or other
  misc_difference 66: note = a, c, u, g, unknown, or other
  misc_difference 67: note = a, c, u, g, unknown, or other
  misc_difference 68: note = a, c, u, g, unknown, or other
  misc_difference 69: note = a, c, u, g, unknown, or other
  misc_difference 70: note = a, c, u, g, unknown, or other
  misc_difference 86: note = a, c, u, g, unknown, or other
  misc_difference 112: note = a, c, u, g, unknown, or other
  misc_difference 129: note = a, c, u, g, unknown, or other
  misc_difference 130: note = a, c, u, g, unknown, or other
  misc_difference 138: note = a, c, u, g, unknown, or other
  misc_difference 139: note = a, c, u, g, unknown, or other
  misc_difference 140: note = a, c, u, g, unknown, or other
  misc_difference 141: note = a, c, u, g, unknown, or other
  misc_difference 142: note = a, c, u, g, unknown, or other
  misc_difference 143: note = a, c, u, g, unknown, or other
  misc_difference 144: note = a, c, u, g, unknown, or other
  misc_difference 148: note = a, c, u, g, unknown, or other
  misc_difference 155: note = a, c, u, g, unknown, or other
  misc_difference 167: note = a, c, u, g, unknown, or other
  misc_difference 175: note = a, c, u, g, unknown, or other
  misc_difference 185: note = a, c, u, g, unknown, or other
  misc_difference 190: note = a, c, u, g, unknown, or other
  misc_difference 198: note = a, c, u, g, unknown, or other
  misc_difference 199: note = a, c, u, g, unknown, or other
  misc_difference 200: note = a, c, u, g, unknown, or other
  misc_difference 201: note = a, c, u, g, unknown, or other
  misc_difference 202: note = a, c, u, g, unknown, or other
  misc_difference 203: note = a, c, u, g, unknown, or other
  misc_difference 204: note = a, c, u, g, unknown, or other
  misc_difference 205: note = a, c, u, g, unknown, or other
  misc_difference 206: note = a, c, u, g, unknown, or other
  misc_difference 208: note = a, c, u, g, unknown, or other
  misc_difference 209: note = a, c, u, g, unknown, or other
  misc_difference 210: note = a, c, u, g, unknown, or other
  misc_difference 214: note = a, c, u, g, unknown, or other
  misc_difference 217: note = a, c, u, g, unknown, or other
  misc_difference 218: note = a, c, u, g, unknown, or other
  misc_difference 219: note = a, c, u, g, unknown, or other
  misc_difference 220: note = a, c, u, g, unknown, or other
  misc_difference 221: note = a, c, u, g, unknown, or other
  misc_difference 222: note = a, c, u, g, unknown, or other
  misc_difference 223: note = a, c, u, g, unknown, or other
  misc_difference 224: note = a, c, u, g, unknown, or other
  misc_difference 227: note = a, c, u, g, unknown, or other
ntnynnryrgyycynnrnnnnggrnynnyggycrccrgryyyggyatgactnnynnccccngtcrnnnnnatgatccrgggggtgntgtcrccgggycyggyggcryygryngaccgctgatagggacnnggccrccnnnnnnnrgynggyctcntcgtaacgtggntgccggcnryygrygcyngryyngygrccrnnnnnnnnnynnngrrngrnnnnnnnnryn

SEQ ID NO: 795500 - RNA, 225 nt, unidentified
  source 1..225: mol_type = unassigned RNA; note = ISCARN52
  misc_difference 4: note = a, c, u, g, unknown, or other
  misc_difference 7: note = a, c, u, g, unknown, or other
  misc_difference 9: note = a, c, u, g, unknown, or other
  misc_difference 10: note = a, c, u, g, unknown, or other
  misc_difference 11: note = a, c, u, g, unknown, or other
  misc_difference 12: note = a, c, u, g, unknown, or other
  misc_difference 13: note = a, c, u, g, unknown, or other
  misc_difference 14: note = a, c, u, g, unknown, or other
  misc_difference 15: note = a, c, u, g, unknown, or other
  misc_difference 16: note = a, c, u, g, unknown, or other
  misc_difference 19: note = a, c, u, g, unknown, or other
  misc_difference 20: note = a, c, u, g, unknown, or other
  misc_difference 21: note = a, c, u, g, unknown, or other
  misc_difference 22: note = a, c, u, g, unknown, or other
  misc_difference 23: note = a, c, u, g, unknown, or other
  misc_difference 26: note = a, c, u, g, unknown, or other
  misc_difference 28: note = a, c, u, g, unknown, or other
  misc_difference 31: note = a, c, u, g, unknown, or other
  misc_difference 36: note = a, c, u, g, unknown, or other
  misc_difference 37: note = a, c, u, g, unknown, or other
  misc_difference 42: note = a, c, u, g, unknown, or other
  misc_difference 53: note = a, c, u, g, unknown, or other
  misc_difference 54: note = a, c, u, g, unknown, or other
  misc_difference 55: note = a, c, u, g, unknown, or other
  misc_difference 56: note = a, c, u, g, unknown, or other
  misc_difference 57: note = a, c, u, g, unknown, or other
  misc_difference 58: note = a, c, u, g, unknown, or other
  misc_difference 59: note = a, c, u, g, unknown, or other
  misc_difference 60: note = a, c, u, g, unknown, or other
  misc_difference 63: note = a, c, u, g, unknown, or other
  misc_difference 68: note = a, c, u, g, unknown, or other
  misc_difference 69: note = a, c, u, g, unknown, or other
  misc_difference 70: note = a, c, u, g, unknown, or other
  misc_difference 71: note = a, c, u, g, unknown, or other
  misc_difference 72: note = a, c, u, g, unknown, or other
  misc_difference 73: note = a, c, u, g, unknown, or other
  misc_difference 74: note = a, c, u, g, unknown, or other
  misc_difference 75: note = a, c, u, g, unknown, or other
  misc_difference 76: note = a, c, u, g, unknown, or other
  misc_difference 77: note = a, c, u, g, unknown, or other
  misc_difference 78: note = a, c, u, g, unknown, or other
  misc_difference 79: note = a, c, u, g, unknown, or other
  misc_difference 80: note = a, c, u, g, unknown, or other
  misc_difference 88: note = a, c, u, g, unknown, or other
  misc_difference 89: note = a, c, u, g, unknown, or other
  misc_difference 90: note = a, c, u, g, unknown, or other
  misc_difference 91: note = a, c, u, g, unknown, or other
  misc_difference 92: note = a, c, u, g, unknown, or other
  misc_difference 93: note = a, c, u, g, unknown, or other
  misc_difference 98: note = a, c, u, g, unknown, or other
  misc_difference 108: note = a, c, u, g, unknown, or other
  misc_difference 109: note = a, c, u, g, unknown, or other
  misc_difference 110: note = a, c, u, g, unknown, or other
  misc_difference 112: note = a, c, u, g, unknown, or other
  misc_difference 113: note = a, c, u, g, unknown, or other
  misc_difference 115: note = a, c, u, g, unknown, or other
  misc_difference 139: note = a, c, u, g, unknown, or other
  misc_difference 140: note = a, c, u, g, unknown, or other
  misc_difference 141: note = a, c, u, g, unknown, or other
  misc_difference 142: note = a, c, u, g, unknown, or other
  misc_difference 143: note = a, c, u, g, unknown, or other
  misc_difference 144: note = a, c, u, g, unknown, or other
  misc_difference 145: note = a, c, u, g, unknown, or other
  misc_difference 146: note = a, c, u, g, unknown, or other
  misc_difference 153: note = a, c, u, g, unknown, or other
  misc_difference 154: note = a, c, u, g, unknown, or other
  misc_difference 155: note = a, c, u, g, unknown, or other
  misc_difference 156: note = a, c, u, g, unknown, or other
  misc_difference 174: note = a, c, u, g, unknown, or other
  misc_difference 180: note = a, c, u, g, unknown, or other
  misc_difference 181: note = a, c, u, g, unknown, or other
  misc_difference 182: note = a, c, u, g, unknown, or other
  misc_difference 184: note = a, c, u, g, unknown, or other
  misc_difference 186: note = a, c, u, g, unknown, or other
  misc_difference 188: note = a, c, u, g, unknown, or other
  misc_difference 190: note = a, c, u, g, unknown, or other
  misc_difference 191: note = a, c, u, g, unknown, or other
  misc_difference 192: note = a, c, u, g, unknown, or other
  misc_difference 194: note = a, c, u, g, unknown, or other
  misc_difference 195: note = a, c, u, g, unknown, or other
  misc_difference 197: note = a, c, u, g, unknown, or other
  misc_difference 198: note = a, c, u, g, unknown, or other
  misc_difference 200: note = a, c, u, g, unknown, or other
  misc_difference 201: note = a, c, u, g, unknown, or other
  misc_difference 202: note = a, c, u, g, unknown, or other
  misc_difference 203: note = a, c, u, g, unknown, or other
  misc_difference 204: note = a, c, u, g, unknown, or other
  misc_difference 205: note = a, c, u, g, unknown, or other
  misc_difference 214: note = a, c, u, g, unknown, or other
  misc_difference 216: note = a, c, u, g, unknown, or other
  misc_difference 219: note = a, c, u, g, unknown, or other
  misc_difference 220: note = a, c, u, g, unknown, or other
yyrnrynrnnnnnnnnrrnnnnnyrnynranygccnngtycnggygactgcgnnnnnnnnyynggycnnnnnnnnnnnnngagrycgnnnnnnagatngcagcrccynnnynnrnygracyycaryrtgcaccgrgyynnnnnnnnrgcycannnngagtgcgratggaagcrnggcrrnnnrnynrnynnngnnrnnynnnnnnrgyyrycanrnyrnncttga

SEQ ID NO: 795501 - RNA, 215 nt, unidentified
  source 1..215: mol_type = unassigned RNA; note = ISSlo1
  misc_difference 2: note = a, c, u, g, unknown, or other
  misc_difference 4: note = a, c, u, g, unknown, or other
  misc_difference 7: note = a, c, u, g, unknown, or other
  misc_difference 8: note = a, c, u, g, unknown, or other
  misc_difference 9: note = a, c, u, g, unknown, or other
  misc_difference 10: note = a, c, u, g, unknown, or other
  misc_difference 12: note = a, c, u, g, unknown, or other
  misc_difference 13: note = a, c, u, g, unknown, or other
  misc_difference 17: note = a, c, u, g, unknown, or other
  misc_difference 18: note = a, c, u, g, unknown, or other
  misc_difference 19: note = a, c, u, g, unknown, or other
  misc_difference 21: note = a, c, u, g, unknown, or other
  misc_difference 22: note = a, c, u, g, unknown, or other
  misc_difference 23: note = a, c, u, g, unknown, or other
  misc_difference 24: note = a, c, u, g, unknown, or other
  misc_difference 25: note = a, c, u, g, unknown, or other
  misc_difference 26: note = a, c, u, g, unknown, or other
  misc_difference 27: note = a, c, u, g, unknown, or other
  misc_difference 28: note = a, c, u, g, unknown, or other
  misc_difference 34: note = a, c, u, g, unknown, or other
  misc_difference 36: note = a, c, u, g, unknown, or other
  misc_difference 53: note = a, c, u, g, unknown, or other
  misc_difference 55: note = a, c, u, g, unknown, or other
  misc_difference 57: note = a, c, u, g, unknown, or other
  misc_difference 58: note = a, c, u, g, unknown, or other
  misc_difference 62: note = a, c, u, g, unknown, or other
  misc_difference 63: note = a, c, u, g, unknown, or other
  misc_difference 67: note = a, c, u, g, unknown, or other
  misc_difference 68: note = a, c, u, g, unknown, or other
  misc_difference 69: note = a, c, u, g, unknown, or other
  misc_difference 70: note = a, c, u, g, unknown, or other
  misc_difference 71: note = a, c, u, g, unknown, or other
  misc_difference 72: note = a, c, u, g, unknown, or other
  misc_difference 73: note = a, c, u, g, unknown, or other
  misc_difference 75: note = a, c, u, g, unknown, or other
  misc_difference 76: note = a, c, u, g, unknown, or other
  misc_difference 77: note = a, c, u, g, unknown, or other
  misc_difference 80: note = a, c, u, g, unknown, or other
  misc_difference 81: note = a, c, u, g, unknown, or other
  misc_difference 82: note = a, c, u, g, unknown, or other
  misc_difference 83: note = a, c, u, g, unknown, or other
  misc_difference 84: note = a, c, u, g, unknown, or other
  misc_difference 85: note = a, c, u, g, unknown, or other
  misc_difference 86: note = a, c, u, g, unknown, or other
  misc_difference 88: note = a, c, u, g, unknown, or other
  misc_difference 89: note = a, c, u, g, unknown, or other
  misc_difference 93: note = a, c, u, g, unknown, or other
  misc_difference 94: note = a, c, u, g, unknown, or other
  misc_difference 95: note = a, c, u, g, unknown, or other
  misc_difference 98: note = a, c, u, g, unknown, or other
  misc_difference 103: note = a, c, u, g, unknown, or other
  misc_difference 107: note = a, c, u, g, unknown, or other
  misc_difference 109: note = a, c, u, g, unknown, or other
  misc_difference 110: note = a, c, u, g, unknown, or other
  misc_difference 111: note = a, c, u, g, unknown, or other
  misc_difference 113: note = a, c, u, g, unknown, or other
  misc_difference 120: note = a, c, u, g, unknown, or other
  misc_difference 129: note = a, c, u, g, unknown, or other
  misc_difference 134: note = a, c, u, g, unknown, or other
  misc_difference 138: note = a, c, u, g, unknown, or other
  misc_difference 139: note = a, c, u, g, unknown, or other
  misc_difference 140: note = a, c, u, g, unknown, or other
  misc_difference 141: note = a, c, u, g, unknown, or other
  misc_difference 142: note = a, c, u, g, unknown, or other
  misc_difference 143: note = a, c, u, g, unknown, or other
  misc_difference 144: note = a, c, u, g, unknown, or other
  misc_difference 145: note = a, c, u, g, unknown, or other
  misc_difference 146: note = a, c, u, g, unknown, or other
  misc_difference 147: note = a, c, u, g, unknown, or other
  misc_difference 152: note = a, c, u, g, unknown, or other
  misc_difference 153: note = a, c, u, g, unknown, or other
  misc_difference 154: note = a, c, u, g, unknown, or other
  misc_difference 155: note = a, c, u, g, unknown, or other
  misc_difference 157: note = a, c, u, g, unknown, or other
  misc_difference 172: note = a, c, u, g, unknown, or other
  misc_difference 174: note = a, c, u, g, unknown, or other
  misc_difference 181: note = a, c, u, g, unknown, or other
  misc_difference 182: note = a, c, u, g, unknown, or other
  misc_difference 183: note = a, c, u, g, unknown, or other
  misc_difference 184: note = a, c, u, g, unknown, or other
  misc_difference 185: note = a, c, u, g, unknown, or other
  misc_difference 188: note = a, c, u, g, unknown, or other
  misc_difference 192: note = a, c, u, g, unknown, or other
  misc_difference 194: note = a, c, u, g, unknown, or other
  misc_difference 195: note = a, c, u, g, unknown, or other
  misc_difference 196: note = a, c, u, g, unknown, or other
  misc_difference 199: note = a, c, u, g, unknown, or other
  misc_difference 200: note = a, c, u, g, unknown, or other
  misc_difference 201: note = a, c, u, g, unknown, or other
  misc_difference 202: note = a, c, u, g, unknown, or other
  misc_difference 203: note = a, c, u, g, unknown, or other
  misc_difference 209: note = a, c, u, g, unknown, or other
  misc_difference 211: note = a, c, u, g, unknown, or other
  misc_difference 212: note = a, c, u, g, unknown, or other
  misc_difference 213: note = a, c, u, g, unknown, or other
  misc_difference 214: note = a, c, u, g, unknown, or other
  misc_difference 215: note = a, c, u, g, unknown, or other
ynynyynnnnrnntgcnnnrnnnnnnnnratgrnrnrayrggtyrraccgrcnynynnrranncygnnnnnnncnnngrnnnnnnnannycgnnnrrnygatnrrgnrnnnrngcgcgrntyycatyrnggccngrrnnnnnnnnnnyyyrnnnnanaggccggatataygnrngcaryynnnnnyynyyrnynnnyrnnnnnyttgynrnnnnn

SEQ ID NO: 795502 - RNA, 197 nt, unidentified
  source 1..197: mol_type = unassigned RNA; note = ISBfun1
  misc_difference 2: note = a, c, u, g, unknown, or other
  misc_difference 3: note = a, c, u, g, unknown, or other
  misc_difference 4: note = a, c, u, g, unknown, or other
  misc_difference 7: note = a, c, u, g, unknown, or other
  misc_difference 10: note = a, c, u, g, unknown, or other
  misc_difference 13: note = a, c, u, g, unknown, or other
  misc_difference 14: note = a, c, u, g, unknown, or other
  misc_difference 24: note = a, c, u, g, unknown, or other
  misc_difference 26: note = a, c, u, g, unknown, or other
  misc_difference 29: note = a, c, u, g, unknown, or other
  misc_difference 45: note = a, c, u, g, unknown, or other
  misc_difference 49: note = a, c, u, g, unknown, or other
  misc_difference 61: note = a, c, u, g, unknown, or other
  misc_difference 65: note = a, c, u, g, unknown, or other
  misc_difference 66: note = a, c, u, g, unknown, or other
  misc_difference 67: note = a, c, u, g, unknown, or other
  misc_difference 71: note = a, c, u, g, unknown, or other
  misc_difference 72: note = a, c, u, g, unknown, or other
  misc_difference 73: note = a, c, u, g, unknown, or other
  misc_difference 74: note = a, c, u, g, unknown, or other
  misc_difference 75: note = a, c, u, g, unknown, or other
  misc_difference 76: note = a, c, u, g, unknown, or other
  misc_difference 77: note = a, c, u, g, unknown, or other
  misc_difference 79: note = a, c, u, g, unknown, or other
  misc_difference 80: note = a, c, u, g, unknown, or other
  misc_difference 81: note = a, c, u, g, unknown, or other
  misc_difference 82: note = a, c, u, g, unknown, or other
  misc_difference 95: note = a, c, u, g, unknown, or other
  misc_difference 105: note = a, c, u, g, unknown, or other
  misc_difference 133: note = a, c, u, g, unknown, or other
  misc_difference 135: note = a, c, u, g, unknown, or other
  misc_difference 136: note = a, c, u, g, unknown, or other
  misc_difference 137: note = a, c, u, g, unknown, or other
  misc_difference 143: note = a, c, u, g, unknown, or other
  misc_difference 144: note = a, c, u, g, unknown, or other
  misc_difference 152: note = a, c, u, g, unknown, or other
  misc_difference 160: note = a, c, u, g, unknown, or other
  misc_difference 162: note = a, c, u, g, unknown, or other
  misc_difference 170: note = a, c, u, g, unknown, or other
  misc_difference 171: note = a, c, u, g, unknown, or other
  misc_difference 178: note = a, c, u, g, unknown, or other
  misc_difference 179: note = a, c, u, g, unknown, or other
  misc_difference 183: note = a, c, u, g, unknown, or other
  misc_difference 184: note = a, c, u, g, unknown, or other
  misc_difference 185: note = a, c, u, g, unknown, or other
  misc_difference 186: note = a, c, u, g, unknown, or other
  misc_difference 188: note = a, c, u, g, unknown, or other
  misc_difference 189: note = a, c, u, g, unknown, or other
  misc_difference 190: note = a, c, u, g, unknown, or other
  misc_difference 192: note = a, c, u, g, unknown, or other
  misc_difference 193: note = a, c, u, g, unknown, or other
  misc_difference 195: note = a, c, u, g, unknown, or other
  misc_difference 196: note = a, c, u, g, unknown, or other
ynnntgnacngcnngcgttgatgnrnrrnrggttggacccgcgynrggnryryctgryyanyyynnnggrnnnnnnnynnnnyccgryyaacganygrgryccynrcgygcgtcttycatcagggtccgrgcnrnnngcycannatgaccgnttgtagtnyngcagtccnncaycytnnyrynnnnynnnrnnrnnr

SEQ ID NO: 795503 - RNA, 275 nt, unidentified
  source 1..275: mol_type = unassigned RNA; note = ISEnfa110
  misc_difference 1: note = a, c, u, g, unknown, or other
  misc_difference 2: note = a, c, u, g, unknown, or other
  misc_difference 3: note = a, c, u, g, unknown, or other
  misc_difference 8: note = a, c, u, g, unknown, or other
  misc_difference 9: note = a, c, u, g, unknown, or other
  misc_difference 10: note = a, c, u, g, unknown, or other
  misc_difference 11: note = a, c, u, g, unknown, or other
  misc_difference 12: note = a, c, u, g, unknown, or other
  misc_difference 14: note = a, c, u, g, unknown, or other
  misc_difference 15: note = a, c, u, g, unknown, or other
  misc_difference 16: note = a, c, u, g, unknown, or other
  misc_difference 18: note = a, c, u, g, unknown, or other
  misc_difference 19: note = a, c, u, g, unknown, or other
  misc_difference 24: note = a, c, u, g, unknown, or other
  misc_difference 31: note = a, c, u, g, unknown, or other
  misc_difference 32: note = a, c, u, g, unknown, or other
  misc_difference 33: note = a, c, u, g, unknown, or other
  misc_difference 38: note = a, c, u, g, unknown, or other
  misc_difference 39: note = a, c, u, g, unknown, or other
  misc_difference 42: note = a, c, u, g, unknown, or other
  misc_difference 50: note = a, c, u, g, unknown, or other
  misc_difference 53: note = a, c, u, g, unknown, or other
  misc_difference 54: note = a, c, u, g, unknown, or other
  misc_difference 70: note = a, c, u, g, unknown, or other
  misc_difference 74: note = a, c, u, g, unknown, or other
  misc_difference 84: note = a, c, u, g, unknown, or other
  misc_difference 85: note = a, c, u, g, unknown, or other
  misc_difference 86: note = a, c, u, g, unknown, or other
  misc_difference 87: note = a, c, u, g, unknown, or other
  misc_difference 88: note = a, c, u, g, unknown, or other
  misc_difference 89: note = a, c, u, g, unknown, or other
  misc_difference 90: note = a, c, u, g, unknown, or other
  misc_difference 91: note = a, c, u, g, unknown, or other
  misc_difference 92: note = a, c, u, g, unknown, or other
  misc_difference 100: note = a, c, u, g, unknown, or other
  misc_difference 101: note = a, c, u, g, unknown, or other
  misc_difference 102: note = a, c, u, g, unknown, or other
  misc_difference 103: note = a, c, u, g, unknown, or other
  misc_difference 112: note = a, c, u, g, unknown, or other
  misc_difference 113: note = a, c, u, g, unknown, or other
  misc_difference 114: note = a, c, u, g, unknown, or other
  misc_difference 115: note = a, c, u, g, unknown, or other
  misc_difference 116: note = a, c, u, g, unknown, or other
  misc_difference 168: note = a, c, u, g, unknown, or other
  misc_difference 169: note = a, c, u, g, unknown, or other
  misc_difference 170: note = a, c, u, g, unknown, or other
  misc_difference 171: note = a, c, u, g, unknown, or other
  misc_difference 174: note = a, c, u, g, unknown, or other
  misc_difference 186: note = a, c, u, g, unknown, or other
  misc_difference 210: note = a, c, u, g, unknown, or other
  misc_difference 220: note = a, c, u, g, unknown, or other
  misc_difference 236: note = a, c, u, g, unknown, or other
  misc_difference 237: note = a, c, u, g, unknown, or other
  misc_difference 255: note = a, c, u, g, unknown, or other
  misc_difference 263: note = a, c, u, g, unknown, or other
  misc_difference 267: note = a, c, u, g, unknown, or other
nnnttrrnnnnnrnnnynngryanccagyynnnyttynntcnrtytcrynccnnagctacaatragrrgnryanytggctgrcnnnnnnnnncttgggcnnnnaygyccgynnnnnagactgtyagccatccyyttrttgyagcgttcgryttrrgcaggttgrgcynnnnrgngytcgygtcacnyaatagattgaatcggcarygagnaaaagatggntyccrgttgcrrrtynnyryrtyggaggratryrnatgaactnygtnggyatyga

SEQ ID NO: 795504 - RNA, 168 nt, unidentified
  source 1..168: mol_type = unassigned RNA; note = ISSpi5
  misc_difference 1: note = a, c, u, g, unknown, or other
  misc_difference 2: note = a, c, u, g, unknown, or other
  misc_difference 3: note = a, c, u, g, unknown, or other
  misc_difference 4: note = a, c, u, g, unknown, or other
  misc_difference 5: note = a, c, u, g, unknown, or other
  misc_difference 6: note = a, c, u, g, unknown, or other
  misc_difference 13: note = a, c, u, g, unknown, or other
  misc_difference 14: note = a, c, u, g, unknown, or other
  misc_difference 24: note = a, c, u, g, unknown, or other
  misc_difference 25: note = a, c, u, g, unknown, or other
  misc_difference 33: note = a, c, u, g, unknown, or other
  misc_difference 36: note = a, c, u, g, unknown, or other
  misc_difference 44: note = a, c, u, g, unknown, or other
  misc_difference 46: note = a, c, u, g, unknown, or other
  misc_difference 66: note = a, c, u, g, unknown, or other
  misc_difference 67: note = a, c, u, g, unknown, or other
  misc_difference 68: note = a, c, u, g, unknown, or other
  misc_difference 69: note = a, c, u, g, unknown, or other
  misc_difference 70: note = a, c, u, g, unknown, or other
  misc_difference 71: note = a, c, u, g, unknown, or other
  misc_difference 72: note = a, c, u, g, unknown, or other
  misc_difference 73: note = a, c, u, g, unknown, or other
  misc_difference 82: note = a, c, u, g, unknown, or other
  misc_difference 103: note = a, c, u, g, unknown, or other
  misc_difference 105: note = a, c, u, g, unknown, or other
  misc_difference 118: note = a, c, u, g, unknown, or other
  misc_difference 119: note = a, c, u, g, unknown, or other
  misc_difference 130: note = a, c, u, g, unknown, or other
  misc_difference 133: note = a, c, u, g, unknown, or other
  misc_difference 146: note = a, c, u, g, unknown, or other
  misc_difference 147: note = a, c, u, g, unknown, or other
  misc_difference 149: note = a, c, u, g, unknown, or other
  misc_difference 164: note = a, c, u, g, unknown, or other
  misc_difference 167: note = a, c, u, g, unknown, or other
  misc_difference 168: note = a, c, u, g, unknown, or other
nnnnnngggtaanntgagrcccannctttrgyngcnacyraagnyntyytrtryrgyagytcgrtnnnnnnnnggytcctcnrtygagagaccgrtaacragnrngarcrcyryayrnnactcyaagyanyanactcgratagtcnncngggyctcgarcccgnatnn

SEQ ID NO: 795505 - RNA, 298 nt, unidentified
  source 1..298: mol_type = unassigned RNA; note = ISChy1
  misc_difference 1: note = a, c, u, g, unknown, or other
  misc_difference 2: note = a, c, u, g, unknown, or other
  misc_difference 3: note = a, c, u, g, unknown, or other
  misc_difference 4: note = a, c, u, g, unknown, or other
  misc_difference 5: note = a, c, u, g, unknown, or other
  misc_difference 6: note = a, c, u, g, unknown, or other
  misc_difference 7: note = a, c, u, g, unknown, or other
  misc_difference 8: note = a, c, u, g, unknown, or other
  misc_difference 10: note = a, c, u, g, unknown, or other
  misc_difference 13: note = a, c, u, g, unknown, or other
  misc_difference 14: note = a, c, u, g, unknown, or other
  misc_difference 15: note = a, c, u, g, unknown, or other
  misc_difference 16: note = a, c, u, g, unknown, or other
  misc_difference 17: note = a, c, u, g, unknown, or other
  misc_difference 18: note = a, c, u, g, unknown, or other
  misc_difference 20: note = a, c, u, g, unknown, or other
  misc_difference 21: note = a, c, u, g, unknown, or other
  misc_difference 22: note = a, c, u, g, unknown, or other
  misc_difference 23: note = a, c, u, g, unknown, or other
  misc_difference 24: note = a, c, u, g, unknown, or other
  misc_difference 25: note = a, c, u, g, unknown, or other
  misc_difference 27: note = a, c, u, g, unknown, or other
  misc_difference 28: note = a, c, u, g, unknown, or other
  misc_difference 29: note = a, c, u, g, unknown, or other
  misc_difference 31: note = a, c, u, g, unknown, or other
  misc_difference 32: note = a, c, u, g, unknown, or other
  misc_difference 33: note = a, c, u, g, unknown, or other
  misc_difference 34: note = a, c, u, g, unknown, or other
  misc_difference 36: note = a, c, u, g, unknown, or other
  misc_difference 37: note = a, c, u, g, unknown, or other
  misc_difference 38: note = a, c, u, g, unknown, or other
  misc_difference 39: note = a, c, u, g, unknown, or other
  misc_difference 40: note = a, c, u, g, unknown, or other
  misc_difference 42: note = a, c, u, g, unknown, or other
  misc_difference 44: note = a, c, u, g, unknown, or other
  misc_difference 45: note = a, c, u, g, unknown, or other
  misc_difference 46: note = a, c, u, g, unknown, or other
  misc_difference 47: note = a, c, u, g, unknown, or other
  misc_difference 48: note = a, c, u, g, unknown, or other
  misc_difference 50: note = a, c, u, g, unknown, or other
  misc_difference 53: note = a, c, u, g, unknown, or other
  misc_difference 54: note = a, c, u, g, unknown, or other
  misc_difference 55: note = a, c, u, g, unknown, or other
  misc_difference 60: note = a, c, u, g, unknown, or other
  misc_difference 63: note = a, c, u, g, unknown, or other
  misc_difference 64: note = a, c, u, g, unknown, or other
  misc_difference 68: note = a, c, u, g, unknown, or other
  misc_difference 70: note = a, c, u, g, unknown, or other
  misc_difference 72: note = a, c, u, g, unknown, or other
  misc_difference 73: note = a, c, u, g, unknown, or other
  misc_difference 74: note = a, c, u, g, unknown, or other
  misc_difference 76: note = a, c, u, g, unknown, or other
  misc_difference 80: note = a, c, u, g, unknown, or other
  misc_difference 82: note = a, c, u, g, unknown, or other
  misc_difference 85: note = a, c, u, g, unknown, or other
  misc_difference 86: note = a, c, u, g, unknown, or other
  misc_difference 91: note = a, c, u, g, unknown, or other
  misc_difference 93: note = a, c, u, g, unknown, or other
  misc_difference 94: note = a, c, u, g, unknown, or other
  misc_difference 98: note = a, c, u, g, unknown, or other
  misc_difference 99: note = a, c, u, g, unknown, or other
  misc_difference 100: note = a, c, u, g, unknown, or other
  misc_difference 101: note = a, c, u, g, unknown, or other
  misc_difference 102: note = a, c, u, g, unknown, or other
  misc_difference 111: note = a, c, u, g, unknown, or other
  misc_difference 113: note = a, c, u, g, unknown, or other
  misc_difference 114: note = a, c, u, g, unknown, or other
  misc_difference 116: note = a, c, u, g, unknown, or other
  misc_difference 117: note = a, c, u, g, unknown, or other
  misc_difference 118: note = a, c, u, g, unknown, or other
  misc_difference 119: note = a, c, u, g, unknown, or other
  misc_difference 120: note = a, c, u, g, unknown, or other
  misc_difference 121: note = a, c, u, g, unknown, or other
  misc_difference 122: note = a, c, u, g, unknown, or other
  misc_difference 123: note = a, c, u, g, unknown, or other
  misc_difference 127: note = a, c, u, g, unknown, or other
  misc_difference 131: note = a, c, u, g, unknown, or other
  misc_difference 132: note = a, c, u, g, unknown, or other
  misc_difference 133: note = a, c, u, g, unknown, or other
  misc_difference 134: note = a, c, u, g, unknown, or other
  misc_difference 138: note = a, c, u, g, unknown, or other
  misc_difference 139: note = a, c, u, g, unknown, or other
  misc_difference 142: note = a, c, u, g, unknown, or other
  misc_difference 143: note = a, c, u, g, unknown, or other
  misc_difference 144: note = a, c, u, g, unknown, or other
  misc_difference 148: note = a, c, u, g, unknown, or other
  misc_difference 150: note = a, c, u, g, unknown, or other
  misc_difference 151: note = a, c, u, g, unknown, or other
  misc_difference 152: note = a, c, u, g, unknown, or other
  misc_difference 156: note = a, c, u, g, unknown, or other
  misc_difference 158: note = a, c, u, g, unknown, or other
  misc_difference 159: note = a, c, u, g, unknown, or other
  misc_difference 160: note = a, c, u, g, unknown, or other
  misc_difference 161: note = a, c, u, g, unknown, or other
  misc_difference 163: note = a, c, u, g, unknown, or other
  misc_difference 168: note = a, c, u, g, unknown, or other
  misc_difference 171: note = a, c, u, g, unknown, or other
  misc_difference 175: note = a, c, u, g, unknown, or other
  misc_difference 182: note = a, c, u, g, unknown, or other
  misc_difference 184: note = a, c, u, g, unknown, or other
  misc_difference 185: note = a, c, u, g, unknown, or other
  misc_difference 187: note = a, c, u, g, unknown, or other
  misc_difference 188: note = a, c, u, g, unknown, or other
  misc_difference 189: note = a, c, u, g, unknown, or other
  misc_difference 190: note = a, c, u, g, unknown, or other
  misc_difference 191: note = a, c, u, g, unknown, or other
  misc_difference 192: note = a, c, u, g, unknown, or other
  misc_difference 193: note = a, c, u, g, unknown, or other
  misc_difference 194: note = a, c, u, g, unknown, or other
  misc_difference 195: note = a, c, u, g, unknown, or other
  misc_difference 196: note = a, c, u, g, unknown, or other
  misc_difference 197: note = a, c, u, g, unknown, or other
  misc_difference 198: note = a, c, u, g, unknown, or other
  misc_difference 199: note = a, c, u, g, unknown, or other
  misc_difference 200: note = a, c, u, g, unknown, or other
  misc_difference 201: note = a, c, u, g, unknown, or other
  misc_difference 203: note = a, c, u, g, unknown, or other
  misc_difference 205: note = a, c, u, g, unknown, or other
  misc_difference 206: note = a, c, u, g, unknown, or other
  misc_difference 207: note = a, c, u, g, unknown, or other
  misc_difference 213: note = a, c, u, g, unknown, or other
  misc_difference 214: note = a, c, u, g, unknown, or other
  misc_difference 215: note = a, c, u, g, unknown, or other
  misc_difference 216: note = a, c, u, g, unknown, or other
  misc_difference 220: note = a, c, u, g, unknown, or other
  misc_difference 223: note = a, c, u, g, unknown, or other
  misc_difference 224: note = a, c, u, g, unknown, or other
  misc_difference 225: note = a, c, u, g, unknown, or other
  misc_difference 228: note = a, c, u, g, unknown, or other
  misc_difference 229: note = a, c, u, g, unknown, or other
  misc_difference 230: note = a, c, u, g, unknown, or other
  misc_difference 231: note = a, c, u, g, unknown, or other
  misc_difference 232: note = a, c, u, g, unknown, or other
  misc_difference 233: note = a, c, u, g, unknown, or other
  misc_difference 234: note = a, c, u, g, unknown, or other
  misc_difference 235: note = a, c, u, g, unknown, or other
  misc_difference 236: note = a, c, u, g, unknown, or other
  misc_difference 237: note = a, c, u, g, unknown, or other
  misc_difference 239: note = a, c, u, g, unknown, or other
  misc_difference 241: note = a, c, u, g, unknown, or other
  misc_difference 245: note = a, c, u, g, unknown, or other
  misc_difference 248: note = a, c, u, g, unknown, or other
  misc_difference 251: note = a, c, u, g, unknown, or other
  misc_difference 252: note = a, c, u, g, unknown, or other
  misc_difference 259: note = a, c, u, g, unknown, or other
  misc_difference 264: note = a, c, u, g, unknown, or other
  misc_difference 265: note = a, c, u, g, unknown, or other
  misc_difference 266: note = a, c, u, g, unknown, or other
  misc_difference 267: note = a, c, u, g, unknown, or other
  misc_difference 268: note = a, c, u, g, unknown, or other
  misc_difference 270: note = a, c, u, g, unknown, or other
  misc_difference 274: note = a, c, u, g, unknown, or other
  misc_difference 275: note = a, c, u, g, unknown, or other
  misc_difference 276: note = a, c, u, g, unknown, or other
  misc_difference 277: note = a, c, u, g, unknown, or other
  misc_difference 286: note = a, c, u, g, unknown, or other
  misc_difference 287: note = a, c, u, g, unknown, or other
  misc_difference 291: note = a, c, u, g, unknown, or other
  misc_difference 292: note = a, c, u, g, unknown, or other
  misc_difference 293: note = a, c, u, g, unknown, or other
  misc_difference 295: note = a, c, u, g, unknown, or other
  misc_difference 296: note = a, c, u, g, unknown, or other
  misc_difference 297: note = a, c, u, g, unknown, or other
nnnnnnnnrnyrnnnnnnynnnnnnynnnynnnnynnnnntnrnnnnnynrrnnnryyynygnnayrntnrnnnynrrgnynrtnnrggrnannyctnnnnncyycytgyngnnynnnnnnnnacynctynnnnragnntgnnncccngnnnyyrnynnnnrnttctnacncgynrgytgyncnnynnnnnnnnnnnnnnnynrnnnyagcannnnrrrnyrnnnyynnnnnnnnnnrnynagtnctnatnnrcgaggntgyynnnnnrnyrrnnnnyyrrggrynnycynnnynnny

SEQ ID NO: 795506 - RNA, 257 nt, unidentified
  source 1..257: mol_type = unassigned RNA; note = ISRle1
  misc_difference 1: note = a, c, u, g, unknown, or other
  misc_difference 2: note = a, c, u, g, unknown, or other
  misc_difference 3: note = a, c, u, g, unknown, or other
  misc_difference 4: note = a, c, u, g, unknown, or other
  misc_difference 5: note = a, c, u, g, unknown, or other
  misc_difference 6: note = a, c, u, g, unknown, or other
  misc_difference 7: note = a, c, u, g, unknown, or other
  misc_difference 8: note = a, c, u, g, unknown, or other
  misc_difference 9: note = a, c, u, g, unknown, or other
  misc_difference 10: note = a, c, u, g, unknown, or other
  misc_difference 13: note = a, c, u, g, unknown, or other
  misc_difference 14: note = a, c, u, g, unknown, or other
  misc_difference 16: note = a, c, u, g, unknown, or other
  misc_difference 19: note = a, c, u, g, unknown, or other
  misc_difference 22: note = a, c, u, g, unknown, or other
  misc_difference 23: note = a, c, u, g, unknown, or other
  misc_difference 24: note = a, c, u, g, unknown, or other
  misc_difference 25: note = a, c, u, g, unknown, or other
  misc_difference 26: note = a, c, u, g, unknown, or other
  misc_difference 28: note = a, c, u, g, unknown, or other
  misc_difference 29: note = a, c, u, g, unknown, or other
  misc_difference 30: note = a, c, u, g, unknown, or other
  misc_difference 31: note = a, c, u, g, unknown, or other
  misc_difference 32: note = a, c, u, g, unknown, or other
  misc_difference 33: note = a, c, u, g, unknown, or other
  misc_difference 35: note = a, c, u, g, unknown, or other
  misc_difference 36: note = a, c, u, g, unknown, or other
  misc_difference 37: note = a, c, u, g, unknown, or other
  misc_difference 40: note = a, c, u, g, unknown, or other
  misc_difference 41: note = a, c, u, g, unknown, or other
  misc_difference 42: note = a, c, u, g, unknown, or other
  misc_difference 43: note = a, c, u, g, unknown, or other
  misc_difference 45: note = a, c, u, g, unknown, or other
  misc_difference 49: note = a, c, u, g, unknown, or other
  misc_difference 50: note = a, c, u, g, unknown, or other
  misc_difference 58: note = a, c, u, g, unknown, or other
  misc_difference 59: note = a, c, u, g, unknown, or other
  misc_difference 61: note = a, c, u, g, unknown, or other
  misc_difference 62: note = a, c, u, g, unknown, or other
  misc_difference 64: note = a, c, u, g, unknown, or other
  misc_difference 71: note = a, c, u, g, unknown, or other
  misc_difference 75: note = a, c, u, g, unknown, or other
  misc_difference 83: note = a, c, u, g, unknown, or other
  misc_difference 87: note = a, c, u, g, unknown, or other
  misc_difference 88: note = a, c, u, g, unknown, or other
  misc_difference 97: note = a, c, u, g, unknown, or other
  misc_difference 99: note = a, c, u, g, unknown, or other
  misc_difference 104: note = a, c, u, g, unknown, or other
  misc_difference 105: note = a, c, u, g, unknown, or other
  misc_difference 106: note = a, c, u, g, unknown, or other
  misc_difference 107: note = a, c, u, g, unknown, or other
  misc_difference 108: note = a, c, u, g, unknown, or other
  misc_difference 109: note = a, c, u, g, unknown, or other
  misc_difference 110: note = a, c, u, g, unknown, or other
  misc_difference 111: note = a, c, u, g, unknown, or other
  misc_difference 114: note = a, c, u, g, unknown, or other
  misc_difference 115: note = a, c, u, g, unknown, or other
  misc_difference 117: note = a, c, u, g, unknown, or other
  misc_difference 120: note = a, c, u, g, unknown, or other
  misc_difference 121: note = a, c, u, g, unknown, or other
  misc_difference 125: note = a, c, u, g, unknown, or other
  misc_difference 127: note = a, c, u, g, unknown, or other
  misc_difference 130: note = a, c, u, g, unknown, or other
  misc_difference 131: note = a, c, u, g, unknown, or other
  misc_difference 132: note = a, c, u, g, unknown, or other
  misc_difference 133: note = a, c, u, g, unknown, or other
  misc_difference 134: note = a, c, u, g, unknown, or other
  misc_difference 135: note = a, c, u, g, unknown, or other
  misc_difference 140: note = a, c, u, g, unknown, or other
  misc_difference 152: note = a, c, u, g, unknown, or other
  misc_difference 158: note = a, c, u, g, unknown, or other
  misc_difference 159: note = a, c, u, g, unknown, or other
  misc_difference 160: note = a, c, u, g, unknown, or other
  misc_difference 179: note = a, c, u, g, unknown, or other
  misc_difference 180: note = a, c, u, g, unknown, or other
  misc_difference 181: note = a, c, u, g, unknown, or other
  misc_difference 182: note = a, c, u, g, unknown, or other
  misc_difference 183: note = a, c, u, g, unknown, or other
  misc_difference 191: note = a, c, u, g, unknown, or other
  misc_difference 192: note = a, c, u, g, unknown, or other
  misc_difference 194: note = a, c, u, g, unknown, or other
  misc_difference 215: note = a, c, u, g, unknown, or other
  misc_difference 216: note = a, c, u, g, unknown, or other
  misc_difference 221: note = a, c, u, g, unknown, or other
  misc_difference 222: note = a, c, u, g, unknown, or other
  misc_difference 223: note = a, c, u, g, unknown, or other
  misc_difference 224: note = a, c, u, g, unknown, or other
  misc_difference 227: note = a, c, u, g, unknown, or other
  misc_difference 228: note = a, c, u, g, unknown, or other
  misc_difference 229: note = a, c, u, g, unknown, or other
  misc_difference 230: note = a, c, u, g, unknown, or other
  misc_difference 234: note = a, c, u, g, unknown, or other
  misc_difference 235: note = a, c, u, g, unknown, or other
  misc_difference 236: note = a, c, u, g, unknown, or other
  misc_difference 238: note = a, c, u, g, unknown, or other
  misc_difference 239: note = a, c, u, g, unknown, or other
  misc_difference 240: note = a, c, u, g, unknown, or other
  misc_difference 241: note = a, c, u, g, unknown, or other
  misc_difference 242: note = a, c, u, g, unknown, or other
  misc_difference 250: note = a, c, u, g, unknown, or other
  misc_difference 251: note = a, c, u, g, unknown, or other
  misc_difference 252: note = a, c, u, g, unknown, or other
  misc_difference 253: note = a, c, u, g, unknown, or other
  misc_difference 254: note = a, c, u, g, unknown, or other
nnnnnnnnnngynnyngcnyrnnnnnynnnnnnrnnnrynnnnrnttgnnrgrgyrrnnannrnrtgatgnrarncgryygrnccgnnraycrrgrnanccygnnnnnnnntcnngngcnnyrancncgnnnnnntgatnrggacyygrtyngcggannncatcagggccagcggycrnnnnnrcygcrynnanaggccgrayacatgacygcanncgacnnnnyrnnnnyrynnnrnnnnnyycttgcnnnnnrgg

SEQ ID NO: 795507 - RNA, 432 nt, unidentified
  source 1..432: mol_type = unassigned RNA; note = ISShwo5
  misc_difference 2: note = a, c, u, g, unknown, or other
  misc_difference 5: note = a, c, u, g, unknown, or other
  misc_difference 6: note = a, c, u, g, unknown, or other
  misc_difference 8: note = a, c, u, g, unknown, or other
  misc_difference 10: note = a, c, u, g, unknown, or other
  misc_difference 14: note = a, c, u, g, unknown, or other
  misc_difference 15: note = a, c, u, g, unknown, or other
  misc_difference 24: note = a, c, u, g, unknown, or other
  misc_difference 26: note = a, c, u, g, unknown, or other
  misc_difference 39: note = a, c, u, g, unknown, or other
  misc_difference 40: note = a, c, u, g, unknown, or other
  misc_difference 41: note = a, c, u, g, unknown, or other
  misc_difference 42: note = a, c, u, g, unknown, or other
  misc_difference 43: note = a, c, u, g, unknown, or other
  misc_difference 44: note = a, c, u, g, unknown, or other
  misc_difference 46: note = a, c, u, g, unknown, or other
  misc_difference 47: note = a, c, u, g, unknown, or other
  misc_difference 48: note = a, c, u, g, unknown, or other
  misc_difference 53: note = a, c, u, g, unknown, or other
  misc_difference 55: note = a, c, u, g, unknown, or other
  misc_difference 56: note = a, c, u, g, unknown, or other
  misc_difference 57: note = a, c, u, g, unknown, or other
  misc_difference 58: note = a, c, u, g, unknown, or other
  misc_difference 59: note = a, c, u, g, unknown, or other
  misc_difference 60: note = a, c, u, g, unknown, or other
  misc_difference 63: note = a, c, u, g, unknown, or other
  misc_difference 64: note = a, c, u, g, unknown, or other
  misc_difference 65: note = a, c, u, g, unknown, or other
  misc_difference 66: note = a, c, u, g, unknown, or other
  misc_difference 67: note = a, c, u, g, unknown, or other
  misc_difference 68: note = a, c, u, g, unknown, or other
  misc_difference 69: note = a, c, u, g, unknown, or other
  misc_difference 70: note = a, c, u, g, unknown, or other
  misc_difference 71: note = a, c, u, g, unknown, or other
  misc_difference 72: note = a, c, u, g, unknown, or other
  misc_difference 73: note = a, c, u, g, unknown, or other
  misc_difference 75: note = a, c, u, g, unknown, or other
  misc_difference 77: note = a, c, u, g, unknown, or other
  misc_difference 79: note = a, c, u, g, unknown, or other
  misc_difference 80: note = a, c, u, g, unknown, or other
  misc_difference 81: note = a, c, u, g, unknown, or other
  misc_difference 82: note = a, c, u, g, unknown, or other
  misc_difference 84: note = a, c, u, g, unknown, or other
  misc_difference 86: note = a, c, u, g, unknown, or other
  misc_difference 87: note = a, c, u, g, unknown, or other
  misc_difference 88: note = a, c, u, g, unknown, or other
  misc_difference 89: note = a, c, u, g, unknown, or other
  misc_difference 90: note = a, c, u, g, unknown, or other
  misc_difference 91: note = a, c, u, g, unknown, or other
  misc_difference 92: note = a, c, u, g, unknown, or other
  misc_difference 94: note = a, c, u, g, unknown, or other
  misc_difference 95: note = a, c, u, g, unknown, or other
  misc_difference 96: note = a, c, u, g, unknown, or other
  misc_difference 97: note = a, c, u, g, unknown, or other
  misc_difference 98: note = a, c, u, g, unknown, or other
  misc_difference 99: note = a, c, u, g, unknown, or other
  misc_difference 101: note = a, c, u, g, unknown, or other
  misc_difference 102: note = a, c, u, g, unknown, or other
  misc_difference 103: note = a, c, u, g, unknown, or other
  misc_difference 106: note = a, c, u, g, unknown, or other
  misc_difference 107: note = a, c, u, g, unknown, or other
  misc_difference 108: note = a, c, u, g, unknown, or other
  misc_difference 109: note = a, c, u, g, unknown, or other
  misc_difference 110: note = a, c, u, g, unknown, or other
  misc_difference 111: note = a, c, u, g, unknown, or other
  misc_difference 112: note = a, c, u, g, unknown, or other
  misc_difference 113: note = a, c, u, g, unknown, or other
  misc_difference 118: note = a, c, u, g, unknown, or other
  misc_difference 119: note = a, c, u, g, unknown, or other
  misc_difference 120: note = a, c, u, g, unknown, or other
  misc_difference 121: note = a, c, u, g, unknown, or other
  misc_difference 122: note = a, c, u, g, unknown, or other
  misc_difference 123: note = a, c, u, g, unknown, or other
  misc_difference 133: note = a, c, u, g, unknown, or other
  misc_difference 139: note = a, c, u, g, unknown, or other
  misc_difference 140: note = a, c, u, g, unknown, or other
  misc_difference 143: note = a, c, u, g, unknown, or other
  misc_difference 146: note = a, c, u, g, unknown, or other
  misc_difference 148: note = a, c, u, g, unknown, or other
  misc_difference 150: note = a, c, u, g, unknown, or other
  misc_difference 151: note = a, c, u, g, unknown, or other
  misc_difference 152: note = a, c, u, g, unknown, or other
  misc_difference 153: note = a, c, u, g, unknown, or other
  misc_difference 156: note = a, c, u, g, unknown, or other
  misc_difference 158: note = a, c, u, g, unknown, or other
  misc_difference 159: note = a, c, u, g, unknown, or other
  misc_difference 161: note = a, c, u, g, unknown, or other
  misc_difference 165: note = a, c, u, g, unknown, or other
  misc_difference 167: note = a, c, u, g, unknown, or other
  misc_difference 170: note = a, c, u, g, unknown, or other
  misc_difference 172: note = a, c, u, g, unknown, or other
  misc_difference 177: note = a, c, u, g, unknown, or other
  misc_difference 181: note = a, c, u, g, unknown, or other
  misc_difference 182: note = a, c, u, g, unknown, or other
  misc_difference 183: note = a, c, u, g, unknown, or other
  misc_difference 193: note = a, c, u, g, unknown, or other
  misc_difference 194: note = a, c, u, g, unknown, or other
  misc_difference 204: note = a, c, u, g, unknown, or other
  misc_difference 205: note = a, c, u, g, unknown, or other
  misc_difference 207: note = a, c, u, g, unknown, or other
  misc_difference 208: note = a, c, u, g, unknown, or other
  misc_difference 209: note = a, c, u, g, unknown, or other
  misc_difference 210: note = a, c, u, g, unknown, or other
  misc_difference 211: note = a, c, u, g, unknown, or other
  misc_difference 212: note = a, c, u, g, unknown, or other
  misc_difference 213: note = a, c, u, g, unknown, or other
  misc_difference 214: note = a, c, u, g, unknown, or other
  misc_difference 215: note = a, c, u, g, unknown, or other
  misc_difference 216: note = a, c, u, g, unknown, or other
  misc_difference 217: note = a, c, u, g, unknown, or other
  misc_difference 222: note = a, c, u, g, unknown, or other
  misc_difference 223: note = a, c, u, g, unknown, or other
  misc_difference 224: note = a, c, u, g, unknown, or other
  misc_difference 225: note = a, c, u, g, unknown, or other
  misc_difference 226: note = a, c, u, g, unknown, or other
  misc_difference 227: note = a, c, u, g, unknown, or other
  misc_difference 237: note = a, c, u, g, unknown, or other
  misc_difference 239: note = a, c, u, g, unknown, or other
  misc_difference 244: note = a, c, u, g, unknown, or other
  misc_difference 245: note = a, c, u, g, unknown, or other
  misc_difference 246: note = a, c, u, g, unknown, or other
  misc_difference 250: note = a, c, u, g, unknown, or other
  misc_difference 251: note = a, c, u, g, unknown, or other
  misc_difference 258: note = a, c, u, g, unknown, or other
  misc_difference 259: note = a, c, u, g, unknown, or other
  misc_difference 260: note = a, c, u, g, unknown, or other
  misc_difference 263: note = a, c, u, g, unknown, or other
  misc_difference 269: note = a, c, u, g, unknown, or other
  misc_difference 271: note = a, c, u, g, unknown, or other
  misc_difference 272: note = a, c, u, g, unknown, or other
  misc_difference 275: note = a, c, u, g, unknown, or other
  misc_difference 277: note = a, c, u, g, unknown, or other
  misc_difference 278: note = a, c, u, g, unknown, or other
  misc_difference 279: note = a, c, u, g, unknown, or other
  misc_difference 280: note = a, c, u, g, unknown, or other
  misc_difference 281: note = a, c, u, g, unknown, or other
  misc_difference 282: note = a, c, u, g, unknown, or other
  misc_difference 283: note = a, c, u, g, unknown, or other
  misc_difference 284: note = a, c, u, g, unknown, or other
  misc_difference 285: note = a, c, u, g, unknown, or other
  misc_difference 286: note = a, c, u, g, unknown, or other
  misc_difference 287: note = a, c, u, g, unknown, or other
  misc_difference 288: note = a, c, u, g, unknown, or other
  misc_difference 289: note = a, c, u, g, unknown, or other
  misc_difference 291: note = a, c, u, g, unknown, or other
  misc_difference 292: note = a, c, u, g, unknown, or other
  misc_difference 293: note = a, c, u, g, unknown, or other
  misc_difference 294: note = a, c, u, g, unknown, or other
  misc_difference 295: note = a, c, u, g, unknown, or other
  misc_difference 297: note = a, c, u, g, unknown, or other
  misc_difference 299: note = a, c, u, g, unknown, or other
  misc_difference 301: note = a, c, u, g, unknown, or other
  misc_difference 302: note = a, c, u, g, unknown, or other
  misc_difference 304: note = a, c, u, g, unknown, or other
  misc_difference 305: note = a, c, u, g, unknown, or other
  misc_difference 306: note = a, c, u, g, unknown, or other
  misc_difference 307: note = a, c, u, g, unknown, or other
  misc_difference 308: note = a, c, u, g, unknown, or other
  misc_difference 309: note = a, c, u, g, unknown, or other
  misc_difference 311: note = a, c, u, g, unknown, or other
  misc_difference 312: note = a, c, u, g, unknown, or other
  misc_difference 316: note = a, c, u, g, unknown, or other
  misc_difference 317: note = a, c, u, g, unknown, or other
  misc_difference 318: note = a, c, u, g, unknown, or other
  misc_difference 319: note = a, c, u, g, unknown, or other
  misc_difference 320: note = a, c, u, g, unknown, or other
  misc_difference 321: note = a, c, u, g, unknown, or other
  misc_difference 324: note = a, c, u, g, unknown, or other
  misc_difference 329: note = a, c, u, g, unknown, or other
  misc_difference 333: note = a, c, u, g, unknown, or other
  misc_difference 341: note = a, c, u, g, unknown, or other
  misc_difference 349: note = a, c, u, g, unknown, or other
  misc_difference 350: note = a, c, u, g, unknown, or other
  misc_difference 351: note = a, c, u, g, unknown, or other
  misc_difference 352: note = a, c, u, g, unknown, or other
  misc_difference 353: note = a, c, u, g, unknown, or other
  misc_difference 354: note = a, c, u, g, unknown, or other
  misc_difference 361: note = a, c, u, g, unknown, or other
  misc_difference 363: note = a, c, u, g, unknown, or other
  misc_difference 365: note = a, c, u, g, unknown, or other
  misc_difference 366: note = a, c, u, g, unknown, or other
  misc_difference 367: note = a, c, u, g, unknown, or other
  misc_difference 371: note = a, c, u, g, unknown, or other
  misc_difference 374: note = a, c, u, g, unknown, or other
  misc_difference 381: note = a, c, u, g, unknown, or other
  misc_difference 383: note = a, c, u, g, unknown, or other
  misc_difference 384: note = a, c, u, g, unknown, or other
  misc_difference 385: note = a, c, u, g, unknown, or other
  misc_difference 386: note = a, c, u, g, unknown, or other
  misc_difference 387: note = a, c, u, g, unknown, or other
  misc_difference 388: note = a, c, u, g, unknown, or other
  misc_difference 394: note = a, c, u, g, unknown, or other
  misc_difference 397: note = a, c, u, g, unknown, or other
  misc_difference 398: note = a, c, u, g, unknown, or other
  misc_difference 399: note = a, c, u, g, unknown, or other
  misc_difference 400: note = a, c, u, g, unknown, or other
  misc_difference 401: note = a, c, u, g, unknown, or other
  misc_difference 402: note = a, c, u, g, unknown, or other
  misc_difference 403: note = a, c, u, g, unknown, or other
  misc_difference 404: note = a, c, u, g, unknown, or other
  misc_difference 405: note = a, c, u, g, unknown, or other
  misc_difference 406: note = a, c, u, g, unknown, or other
  misc_difference 411: note = a, c, u, g, unknown, or other
  misc_difference 412: note = a, c, u, g, unknown, or other
  misc_difference 414: note = a, c, u, g, unknown, or other
  misc_difference 415: note = a, c, u, g, unknown, or other
  misc_difference 416: note = a, c, u, g, unknown, or other
  misc_difference 417: note = a, c, u, g, unknown, or other
  misc_difference 418: note = a, c, u, g, unknown, or other
  misc_difference 419: note = a, c, u, g, unknown, or other
  misc_difference 421: note = a, c, u, g, unknown, or other
  misc_difference 425: note = a, c, u, g, unknown, or other
  misc_difference 428: note = a, c, u, g, unknown, or other
  misc_difference 431: note = a, c, u, g, unknown, or other
  misc_difference 432: note = a, c, u, g, unknown, or other
tnarnnrnrnrrynnrrtragctnrnyryctaactggrnnnnnnrnnngarynynnnnnnrynnnnnnnnnnntnrnynnnnrnynnnnnnnynnnnnnynnnycnnnnnnnnarccnnnnnnyttgattagnyryyynnyynrynynynnnnrynynnynrrynrnrynrnytrcncctnnncygagcctgnnrctaactggnnrnnnnnnnnnnnarccnnnnnnyttgartagngncrrynnnrggnnracyrannnrtntctagnrnncynrnnnnnnnnnnnnnrnnnnnyngnynnynnnnnnrnnryrnnnnnngrncctcnatangtgtttgnygyarrynnnnnnyyrryrnynrnnnyganarnyraarynrnnnnnnyyryynrynnnnnnnnnnyyrrnnrnnnnnnynryynrrnrrnn

SEQ ID NO: 795508 - RNA, 232 nt, unidentified
  source 1..232: mol_type = unassigned RNA; note = ISBcen2
  misc_difference 1: note = a, c, u, g, unknown, or other
  misc_difference 2: note = a, c, u, g, unknown, or other
  misc_difference 3: note = a, c, u, g, unknown, or other
  misc_difference 4: note = a, c, u, g, unknown, or other
  misc_difference 5: note = a, c, u, g, unknown, or other
  misc_difference 6: note = a, c, u, g, unknown, or other
  misc_difference 7: note = a, c, u, g, unknown, or other
  misc_difference 10: note = a, c, u, g, unknown, or other
  misc_difference 11: note = a, c, u, g, unknown, or other
  misc_difference 14: note = a, c, u, g, unknown, or other
  misc_difference 26: note = a, c, u, g, unknown, or other
  misc_difference 32: note = a, c, u, g, unknown, or other
  misc_difference 33: note = a, c, u, g, unknown, or other
  misc_difference 34: note = a, c, u, g, unknown, or other
  misc_difference 35: note = a, c, u, g, unknown, or other
  misc_difference 36: note = a, c, u, g, unknown, or other
  misc_difference 52: note = a, c, u, g, unknown, or other
  misc_difference 55: note = a, c, u, g, unknown, or other
  misc_difference 68: note = a, c, u, g, unknown, or other
  misc_difference 70: note = a, c, u, g, unknown, or other
  misc_difference 75: note = a, c, u, g, unknown, or other
  misc_difference 76: note = a, c, u, g, unknown, or other
  misc_difference 77: note = a, c, u, g, unknown, or other
  misc_difference 78: note = a, c, u, g, unknown, or other
  misc_difference 79: note = a, c, u, g, unknown, or other
  misc_difference 80: note = a, c, u, g, unknown, or other
  misc_difference 81: note = a, c, u, g, unknown, or other
  misc_difference 84: note = a, c, u, g, unknown, or other
  misc_difference 91: note = a, c, u, g, unknown, or other
  misc_difference 92: note = a, c, u, g, unknown, or other
  misc_difference 100: note = a, c, u, g, unknown, or other
  misc_difference 101: note = a, c, u, g, unknown, or other
  misc_difference 102: note = a, c, u, g, unknown, or other
  misc_difference 103: note = a, c, u, g, unknown, or other
  misc_difference 104: note = a, c, u, g, unknown, or other
  misc_difference 105: note = a, c, u, g, unknown, or other
  misc_difference 110: note = a, c, u, g, unknown, or other
  misc_difference 114: note = a, c, u, g, unknown, or other
  misc_difference 148: note = a, c, u, g, unknown, or other
  misc_difference 149: note = a, c, u, g, unknown, or other
  misc_difference 150: note = a, c, u, g, unknown, or other
  misc_difference 151: note = a, c, u, g, unknown, or other
  misc_difference 152: note = a, c, u, g, unknown, or other
  misc_difference 154: note = a, c, u, g, unknown, or other
  misc_difference 159: note = a, c, u, g, unknown, or other
  misc_difference 160: note = a, c, u, g, unknown, or other
  misc_difference 161: note = a, c, u, g, unknown, or other
  misc_difference 162: note = a, c, u, g, unknown, or other
  misc_difference 180: note = a, c, u, g, unknown, or other
  misc_difference 188: note = a, c, u, g, unknown, or other
  misc_difference 189: note = a, c, u, g, unknown, or other
  misc_difference 190: note = a, c, u, g, unknown, or other
  misc_difference 194: note = a, c, u, g, unknown, or other
  misc_difference 195: note = a, c, u, g, unknown, or other
  misc_difference 196: note = a, c, u, g, unknown, or other
  misc_difference 197: note = a, c, u, g, unknown, or other
  misc_difference 201: note = a, c, u, g, unknown, or other
  misc_difference 202: note = a, c, u, g, unknown, or other
  misc_difference 203: note = a, c, u, g, unknown, or other
  misc_difference 208: note = a, c, u, g, unknown, or other
  misc_difference 209: note = a, c, u, g, unknown, or other
  misc_difference 210: note = a, c, u, g, unknown, or other
  misc_difference 220: note = a, c, u, g, unknown, or other
  misc_difference 221: note = a, c, u, g, unknown, or other
  misc_difference 225: note = a, c, u, g, unknown, or other
nnnnnnnycnnycnggttttgcgaynrcygrnnnnngatgacrtraacggcnyancggccygryrrrnancctgnnnnnnnrrnyrgcyynnrargcygnnnnnnttttnaggnyyrycrggcgcgrytctcatcgtggygcgrrrrnnnnnynyccrnnnngacrccggatagatttrngcaagccnnnyaynnnnyyrnnnrycrnnnttgcaaaarnngggnygaccat

SEQ ID NO: 795509 - RNA, 167 nt, unidentified
  source 1..167: mol_type = unassigned RNA; note = ISCaa7
  misc_difference 2: note = a, c, u, g, unknown, or other
  misc_difference 4: note = a, c, u, g, unknown, or other
  misc_difference 5: note = a, c, u, g, unknown, or other
  misc_difference 6: note = a, c, u, g, unknown, or other
  misc_difference 7: note = a, c, u, g, unknown, or other
  misc_difference 12: note = a, c, u, g, unknown, or other
  misc_difference 14: note = a, c, u, g, unknown, or other
  misc_difference 15: note = a, c, u, g, unknown, or other
  misc_difference 17: note = a, c, u, g, unknown, or other
  misc_difference 18: note = a, c, u, g, unknown, or other
  misc_difference 20: note = a, c, u, g, unknown, or other
  misc_difference 21: note = a, c, u, g, unknown, or other
  misc_difference 26: note = a, c, u, g, unknown, or other
  misc_difference 27: note = a, c, u, g, unknown, or other
  misc_difference 31: note = a, c, u, g, unknown, or other
  misc_difference 32: note = a, c, u, g, unknown, or other
  misc_difference 33: note = a, c, u, g, unknown, or other
  misc_difference 34: note = a, c, u, g, unknown, or other
  misc_difference 35: note = a, c, u, g, unknown, or other
  misc_difference 36: note = a, c, u, g, unknown, or other
  misc_difference 37: note = a, c, u, g, unknown, or other
  misc_difference 38: note = a, c, u, g, unknown, or other
  misc_difference 39: note = a, c, u, g, unknown, or other
  misc_difference 41: note = a, c, u, g, unknown, or other
  misc_difference 46: note = a, c, u, g, unknown, or other
  misc_difference 47: note = a, c, u, g, unknown, or other
  misc_difference 48: note = a, c, u, g, unknown, or other
  misc_difference 49: note = a, c, u, g, unknown, or other
  misc_difference 50: note = a, c, u, g, unknown, or other
  misc_difference 58: note = a, c, u, g, unknown, or other
  misc_difference 59: note = a, c, u, g, unknown, or other
  misc_difference 60: note = a, c, u, g, unknown, or other
  misc_difference 61: note = a, c, u, g, unknown, or other
  misc_difference 62: note = a, c, u, g, unknown, or other
  misc_difference 66: note = a, c, u, g, unknown, or other
  misc_difference 67: note = a, c, u, g, unknown, or other
  misc_difference 70: note = a, c, u, g, unknown, or other
  misc_difference 73: note = a, c, u, g, unknown, or other
  misc_difference 74: note = a, c, u, g, unknown, or other
  misc_difference 76: note = a, c, u, g, unknown, or other
  misc_difference 79: note = a, c, u, g, unknown, or other
  misc_difference 80: note = a, c, u, g, unknown, or other
  misc_difference 81: note = a, c, u, g, unknown, or other
  misc_difference 83: note = a, c, u, g, unknown, or other
  misc_difference 85: note = a, c, u, g, unknown, or other
  misc_difference 87: note = a, c, u, g, unknown, or other
  misc_difference 88: note = a, c, u, g, unknown, or other
  misc_difference 91: note = a, c, u, g, unknown, or other
  misc_difference 93: note = a, c, u, g, unknown, or other
  misc_difference 95: note = a, c, u, g, unknown, or other
  misc_difference 96: note = a, c, u, g, unknown, or other
  misc_difference 100: note = a, c, u, g, unknown, or other
  misc_difference 110: note = a, c, u, g, unknown, or other
  misc_difference 116: note = a, c, u, g, unknown, or other
  misc_difference 117: note = a, c, u, g, unknown, or other
  misc_difference 134: note = a, c, u, g, unknown, or other
  misc_difference 140: note = a, c, u, g, unknown, or other
  misc_difference 141: note = a, c, u, g, unknown, or other
  misc_difference 142: note = a, c, u, g, unknown, or other
  misc_difference 143: note = a, c, u, g, unknown, or other
  misc_difference 144: note = a, c, u, g, unknown, or other
  misc_difference 150: note = a, c, u, g, unknown, or other
  misc_difference 151: note = a, c, u, g, unknown, or other
  misc_difference 152: note = a, c, u, g, unknown, or other
  misc_difference 153: note = a, c, u, g, unknown, or other
  misc_difference 154: note = a, c, u, g, unknown, or other
  misc_difference 155: note = a, c, u, g, unknown, or other
  misc_difference 161: note = a, c, u, g, unknown, or other
  misc_difference 163: note = a, c, u, g, unknown, or other
  misc_difference 164: note = a, c, u, g, unknown, or other
  misc_difference 165: note = a, c, u, g, unknown, or other
  misc_difference 166: note = a, c, u, g, unknown, or other
  misc_difference 167: note = a, c, u, g, unknown, or other
rnrnnnnyaaynrnnrnnrnnrgygnnytannnnnnnnncnargynnnnngrcytatnnnnngatnnarncynnynyynnnynynynnrrnrngnntcanatagaaattnrggyynnrgrccyattatyaaggnytyrannnnnryyyrnnnnnnrrttrnynnnnn

SEQ ID NO: 795510 - RNA, 204 nt, unidentified
  source 1..204: mol_type = unassigned RNA; note = ISEc45
  misc_difference 1: note = a, c, u, g, unknown, or other
  misc_difference 2: note = a, c, u, g, unknown, or other
  misc_difference 3: note = a, c, u, g, unknown, or other
  misc_difference 4: note = a, c, u, g, unknown, or other
  misc_difference 6: note = a, c, u, g, unknown, or other
  misc_difference 7: note = a, c, u, g, unknown, or other
  misc_difference 9: note = a, c, u, g, unknown, or other
  misc_difference 10: note = a, c, u, g, unknown, or other
  misc_difference 12: note = a, c, u, g, unknown, or other
  misc_difference 13: note = a, c, u, g, unknown, or other
  misc_difference 14: note = a, c, u, g, unknown, or other
  misc_difference 15: note = a, c, u, g, unknown, or other
  misc_difference 16: note = a, c, u, g, unknown, or other
  misc_difference 17: note = a, c, u, g, unknown, or other
  misc_difference 19: note = a, c, u, g, unknown, or other
  misc_difference 25: note = a, c, u, g, unknown, or other
  misc_difference 26: note = a, c, u, g, unknown, or other
  misc_difference 27: note = a, c, u, g, unknown, or other
  misc_difference 28: note = a, c, u, g, unknown, or other
  misc_difference 29: note = a, c, u, g, unknown, or other
  misc_difference 31: note = a, c, u, g, unknown, or other
  misc_difference 33: note = a, c, u, g, unknown, or other
  misc_difference 37: note = a, c, u, g, unknown, or other
  misc_difference 38: note = a, c, u, g, unknown, or other
  misc_difference 39: note = a, c, u, g, unknown, or other
  misc_difference 52: note = a, c, u, g, unknown, or other
  misc_difference 53: note = a, c, u, g, unknown, or other
  misc_difference 54: note = a, c, u, g, unknown, or other
  misc_difference 55: note = a, c, u, g, unknown, or other
  misc_difference 56: note = a, c, u, g, unknown, or other
  misc_difference 57: note = a, c, u, g, unknown, or other
  misc_difference 58: note = a, c, u, g, unknown, or other
  misc_difference 59: note = a, c, u, g, unknown, or other
  misc_difference 60: note = a, c, u, g, unknown, or other
  misc_difference 61: note = a, c, u, g, unknown, or other
  misc_difference 66: note = a, c, u, g, unknown, or other
  misc_difference 67: note = a, c, u, g, unknown, or other
  misc_difference 68: note = a, c, u, g, unknown, or other
  misc_difference 70: note = a, c, u, g, unknown, or other
  misc_difference 71: note = a, c, u, g, unknown, or other
  misc_difference 72: note = a, c, u, g, unknown, or other
  misc_difference 73: note = a, c, u, g, unknown, or other
  misc_difference 74: note = a, c, u, g, unknown, or other
  misc_difference 75: note = a, c, u, g, unknown, or other
  misc_difference 77: note = a, c, u, g, unknown, or other
  misc_difference 81: note = a, c, u, g, unknown, or other
  misc_difference 87: note = a, c, u, g, unknown, or other
  misc_difference 88: note = a, c, u, g, unknown, or other
  misc_difference 89: note = a, c, u, g, unknown, or other
  misc_difference 94: note = a, c, u, g, unknown, or other
  misc_difference 95: note = a, c, u, g, unknown, or other
  misc_difference 103: note = a, c, u, g, unknown, or other
  misc_difference 107: note = a, c, u, g, unknown, or other
  misc_difference 113: note = a, c, u, g, unknown, or other
  misc_difference 115: note = a, c, u, g, unknown, or other
  misc_difference 116: note = a, c, u, g, unknown, or other
  misc_difference 117: note = a, c, u, g, unknown, or other
  misc_difference 118: note = a, c, u, g, unknown, or other
  misc_difference 119: note = a, c, u, g, unknown, or other
  misc_difference 123: note = a, c, u, g, unknown, or other
  misc_difference 124: note = a, c, u, g, unknown, or other
  misc_difference 126: note = a, c, u, g, unknown, or other
  misc_difference 131: note = a, c, u, g, unknown, or other
  misc_difference 139: note = a, c, u, g, unknown, or other
  misc_difference 142: note = a, c, u, g, unknown, or other
  misc_difference 145: note = a, c, u, g, unknown, or other
  misc_difference 151: note = a, c, u, g, unknown, or other
  misc_difference 154: note = a, c, u, g, unknown, or other
  misc_difference 155: note = a, c, u, g, unknown, or other
  misc_difference 165: note = a, c, u, g, unknown, or other
  misc_difference 166: note = a, c, u, g, unknown, or other
  misc_difference 167: note = a, c, u, g, unknown, or other
  misc_difference 168: note = a, c, u, g, unknown, or other
  misc_difference 169: note = a, c, u, g, unknown, or other
  misc_difference 170: note = a, c, u, g, unknown, or other
  misc_difference 171: note = a, c, u, g, unknown, or other
  misc_difference 173: note = a, c, u, g, unknown, or other
  misc_difference 174: note = a, c, u, g, unknown, or other
  misc_difference 175: note = a, c, u, g, unknown, or other
  misc_difference 176: note = a, c, u, g, unknown, or other
  misc_difference 177: note = a, c, u, g, unknown, or other
  misc_difference 184: note = a, c, u, g, unknown, or other
  misc_difference 185: note = a, c, u, g, unknown, or other
  misc_difference 186: note = a, c, u, g, unknown, or other
  misc_difference 189: note = a, c, u, g, unknown, or other
  misc_difference 191: note = a, c, u, g, unknown, or other
  misc_difference 192: note = a, c, u, g, unknown, or other
  misc_difference 193: note = a, c, u, g, unknown, or other
  misc_difference 194: note = a, c, u, g, unknown, or other
  misc_difference 195: note = a, c, u, g, unknown, or other
  misc_difference 196: note = a, c, u, g, unknown, or other
  misc_difference 197: note = a, c, u, g, unknown, or other
  misc_difference 198: note = a, c, u, g, unknown, or other
  misc_difference 199: note = a, c, u, g, unknown, or other
  misc_difference 200: note = a, c, u, g, unknown, or other
  misc_difference 201: note = a, c, u, g, unknown, or other
  misc_difference 202: note = a, c, u, g, unknown, or other
  misc_difference 203: note = a, c, u, g, unknown, or other
  misc_difference 204: note = a, c, u, g, unknown, or other
nnnnrnnrnnrnnnnnngnyrrrrnnnnnrnyncggnnnrgrraaycctcgnnnnnnnnnnyrrrnnnrnnnnnnynraynyyygynnnyaganngaggyagnyyynygacgnrnnnnnryynngnggtrnyyrayccncgnatnrgagynygnncraycgycgnnnnnnnynnnnnygyyyynnncynynnnnnnnnnnnnnn

SEQ ID NO: 795511 - RNA, 223 nt, unidentified
  source 1..223: mol_type = unassigned RNA; note = ISCps8
  misc_difference 1: note = a, c, u, g, unknown, or other
  misc_difference 3: note = a, c, u, g, unknown, or other
  misc_difference 4: note = a, c, u, g, unknown, or other
  misc_difference 7: note = a, c, u, g, unknown, or other
  misc_difference 14: note = a, c, u, g, unknown, or other
  misc_difference 17: note = a, c, u, g, unknown, or other
  misc_difference 19: note = a, c, u, g, unknown, or other
  misc_difference 20: note = a, c, u, g, unknown, or other
  misc_difference 25: note = a, c, u, g, unknown, or other
  misc_difference 26: note = a, c, u, g, unknown, or other
  misc_difference 30: note = a, c, u, g, unknown, or other
  misc_difference 31: note = a, c, u, g, unknown, or other
  misc_difference 35: note = a, c, u, g, unknown, or other
  misc_difference 36: note = a, c, u, g, unknown, or other
  misc_difference 37: note = a, c, u, g, unknown, or other
  misc_difference 48: note = a, c, u, g, unknown, or other
  misc_difference 53: note = a, c, u, g, unknown, or other
  misc_difference 61: note = a, c, u, g, unknown, or other
  misc_difference 62: note = a, c, u, g, unknown, or other
  misc_difference 63: note = a, c, u, g, unknown, or other
  misc_difference 64: note = a, c, u, g, unknown, or other
  misc_difference 65: note = a, c, u, g, unknown, or other
  misc_difference 66: note = a, c, u, g, unknown, or other
  misc_difference 70: note = a, c, u, g, unknown, or other
  misc_difference 71: note = a, c, u, g, unknown, or other
  misc_difference 73: note = a, c, u, g, unknown, or other
  misc_difference 74: note = a, c, u, g, unknown, or other
  misc_difference 75: note = a, c, u, g, unknown, or other
  misc_difference 76: note = a, c, u, g, unknown, or other
  misc_difference 77: note = a, c, u, g, unknown, or other
  misc_difference 78: note = a, c, u, g, unknown, or other
  misc_difference 79: note = a, c, u, g, unknown, or other
  misc_difference 80: note = a, c, u, g, unknown, or other
  misc_difference 81: note = a, c, u, g, unknown, or other
  misc_difference 82: note = a, c, u, g, unknown, or other
  misc_difference 87: note = a, c, u, g, unknown, or other
  misc_difference 90: note = a, c, u, g, unknown, or other
  misc_difference 93: note = a, c, u, g, unknown, or other
  misc_difference 96: note = a, c, u, g, unknown, or other
  misc_difference 107: note = a, c, u, g, unknown, or other
  misc_difference 116: note = a, c, u, g, unknown, or other
  misc_difference 122: note = a, c, u, g, unknown, or other
  misc_difference 123: note = a, c, u, g, unknown, or other
  misc_difference 124: note = a, c, u, g, unknown, or other
  misc_difference 135: note = a, c, u, g, unknown, or other
  misc_difference 136: note = a, c, u, g, unknown, or other
  misc_difference 137: note = a, c, u, g, unknown, or other
  misc_difference 138: note = a, c, u, g, unknown, or other
  misc_difference 139: note = a, c, u, g, unknown, or other
  misc_difference 140: note = a, c, u, g, unknown, or other
  misc_difference 141: note = a, c, u, g, unknown, or other
  misc_difference 143: note = a, c, u, g, unknown, or other
  misc_difference 145: note = a, c, u, g, unknown, or other
  misc_difference 146: note = a, c, u, g, unknown, or other
  misc_difference 148: note = a, c, u, g, unknown, or other
  misc_difference 149: note = a, c, u, g, unknown, or other
  misc_difference 150: note = a, c, u, g, unknown, or other
  misc_difference 151: note = a, c, u, g, unknown, or other
  misc_difference 152: note = a, c, u, g, unknown, or other
  misc_difference 153: note = a, c, u, g, unknown, or other
  misc_difference 154: note = a, c, u, g, unknown, or other
  misc_difference 177: note = a, c, u, g, unknown, or other
  misc_difference 183: note = a, c, u, g, unknown, or other
  misc_difference 186: note = a, c, u, g, unknown, or other
  misc_difference 187: note = a, c, u, g, unknown, or other
  misc_difference 188: note = a, c, u, g, unknown, or other
  misc_difference 194: note = a, c, u, g, unknown, or other
  misc_difference 204: note = a, c, u, g, unknown, or other
  misc_difference 205: note = a, c, u, g, unknown, or other
  misc_difference 207: note = a, c, u, g, unknown, or other
  misc_difference 210: note = a, c, u, g, unknown, or other
  misc_difference 218: note = a, c, u, g, unknown, or other
  misc_difference 219: note = a, c, u, g, unknown, or other
  misc_difference 221: note = a, c, u, g, unknown, or other
  misc_difference 222: note = a, c, u, g, unknown, or other
  misc_difference 223: note = a, c, u, g, unknown, or other
nrnnytngrgyyanygnrnnrgrynnrgcnncggnnnyggyryaaycnycganrgcgttannnnnnyrrnnrnnnnnnnnnnyyranccncgnrcntagayygargnyaggyrccncgrcgnnnyragtaaggtnnnnnnngntnnynnnnnnnyaayccacgrataycagcatganaaccgncgnnnytacyngctycrycynnyncrntrryycrnnynnn

SEQ ID NO: 795512 - RNA, 168 nt, unidentified
  source 1..168: mol_type = unassigned RNA; note = IS1000A
  misc_difference 1: note = a, c, u, g, unknown, or other
  misc_difference 2: note = a, c, u, g, unknown, or other
  misc_difference 6: note = a, c, u, g, unknown, or other
  misc_difference 7: note = a, c, u, g, unknown, or other
  misc_difference 8: note = a, c, u, g, unknown, or other
  misc_difference 9: note = a, c, u, g, unknown, or other
  misc_difference 12: note = a, c, u, g, unknown, or other
  misc_difference 13: note = a, c, u, g, unknown, or other
  misc_difference 14: note = a, c, u, g, unknown, or other
  misc_difference 15: note = a, c, u, g, unknown, or other
  misc_difference 16: note = a, c, u, g, unknown, or other
  misc_difference 17: note = a, c, u, g, unknown, or other
  misc_difference 18: note = a, c, u, g, unknown, or other
  misc_difference 19: note = a, c, u, g, unknown, or other
  misc_difference 20: note = a, c, u, g, unknown, or other
  misc_difference 21: note = a, c, u, g, unknown, or other
  misc_difference 22: note = a, c, u, g, unknown, or other
  misc_difference 23: note = a, c, u, g, unknown, or other
  misc_difference 24: note = a, c, u, g, unknown, or other
  misc_difference 25: note = a, c, u, g, unknown, or other
  misc_difference 27: note = a, c, u, g, unknown, or other
  misc_difference 29: note = a, c, u, g, unknown, or other
  misc_difference 32: note = a, c, u, g, unknown, or other
  misc_difference 35: note = a, c, u, g, unknown, or other
  misc_difference 39: note = a, c, u, g, unknown, or other
  misc_difference 41: note = a, c, u, g, unknown, or other
  misc_difference 42: note = a, c, u, g, unknown, or other
  misc_difference 43: note = a, c, u, g, unknown, or other
  misc_difference 44: note = a, c, u, g, unknown, or other
  misc_difference 48: note = a, c, u, g, unknown, or other
  misc_difference 51: note = a, c, u, g, unknown, or other
  misc_difference 52: note = a, c, u, g, unknown, or other
  misc_difference 53: note = a, c, u, g, unknown, or other
  misc_difference 54: note = a, c, u, g, unknown, or other
  misc_difference 55: note = a, c, u, g, unknown, or other
  misc_difference 56: note = a, c, u, g, unknown, or other
  misc_difference 60: note = a, c, u, g, unknown, or other
  misc_difference 65: note = a, c, u, g, unknown, or other
  misc_difference 66: note = a, c, u, g, unknown, or other
  misc_difference 67: note = a, c, u, g, unknown, or other
  misc_difference 68: note = a, c, u, g, unknown, or other
  misc_difference 69: note = a, c, u, g, unknown, or other
  misc_difference 73: note = a, c, u, g, unknown, or other
  misc_difference 74: note = a, c, u, g, unknown, or other
  misc_difference 77: note = a, c, u, g, unknown, or other
  misc_difference 79: note = a, c, u, g, unknown, or other
  misc_difference 81: note = a, c, u, g, unknown, or other
  misc_difference 82: note = a, c, u, g, unknown, or other
  misc_difference 84: note = a, c, u, g, unknown, or other
  misc_difference 86: note = a, c, u, g, unknown, or other
  misc_difference 88: note = a, c, u, g, unknown, or other
  misc_difference 89: note = a, c, u, g, unknown, or other
  misc_difference 90: note = a, c, u, g, unknown, or other
  misc_difference 92: note = a, c, u, g, unknown, or other
  misc_difference 94: note = a, c, u, g, unknown, or other
  misc_difference 95: note = a, c, u, g, unknown, or other
  misc_difference 96: note = a, c, u, g, unknown, or other
  misc_difference 97: note = a, c, u, g, unknown, or other
  misc_difference 98: note = a, c, u, g, unknown, or other
  misc_difference 99: note = a, c, u, g, unknown, or other
  misc_difference 101: note = a, c, u, g, unknown, or other
  misc_difference 102: note = a, c, u, g, unknown, or other
  misc_difference 112: note = a, c, u, g, unknown, or other
  misc_difference 113: note = a, c, u, g, unknown, or other
  misc_difference 115: note = a, c, u, g, unknown, or other
  misc_difference 116: note = a, c, u, g, unknown, or other
  misc_difference 119: note = a, c, u, g, unknown, or other
  misc_difference 122: note = a, c, u, g, unknown, or other
  misc_difference 123: note = a, c, u, g, unknown, or other
  misc_difference 124: note = a, c, u, g, unknown, or other
  misc_difference 128: note = a, c, u, g, unknown, or other
  misc_difference 135: note = a, c, u, g, unknown, or other
  misc_difference 136: note = a, c, u, g, unknown, or other
  misc_difference 143: note = a, c, u, g, unknown, or other
  misc_difference 148: note = a, c, u, g, unknown, or other
  misc_difference 149: note = a, c, u, g, unknown, or other
  misc_difference 150: note = a, c, u, g, unknown, or other
  misc_difference 151: note = a, c, u, g, unknown, or other
  misc_difference 152: note = a, c, u, g, unknown, or other
  misc_difference 153: note = a, c, u, g, unknown, or other
  misc_difference 154: note = a, c, u, g, unknown, or other
  misc_difference 155: note = a, c, u, g, unknown, or other
  misc_difference 157: note = a, c, u, g, unknown, or other
  misc_difference 158: note = a, c, u, g, unknown, or other
  misc_difference 159: note = a, c, u, g, unknown, or other
  misc_difference 160: note = a, c, u, g, unknown, or other
  misc_difference 161: note = a, c, u, g, unknown, or other
  misc_difference 162: note = a, c, u, g, unknown, or other
  misc_difference 164: note = a, c, u, g, unknown, or other
  misc_difference 165: note = a, c, u, g, unknown, or other
  misc_difference 166: note = a, c, u, g, unknown, or other
  misc_difference 167: note = a, c, u, g, unknown, or other
  misc_difference 168: note = a, c, u, g, unknown, or other
nnyyrnnnnyrnnnnnnnnnnnnnnrnrngrnrgnycgnynnnnyyynggnnnnnnragnccgynnnnnagynngrncnynnynynynnnynynnnnnnrnnccgracrgtnncnnggncynnnrrgnccgyatnnrcaaggnygrgnnnnnnnnrnnnnnnynnnnn

SEQ ID NO: 795513 - RNA, 241 nt, unidentified
  source 1..241: mol_type = unassigned RNA; note = ISAfe1
  misc_difference 2: note = a, c, u, g, unknown, or other
  misc_difference 3: note = a, c, u, g, unknown, or other
  misc_difference 6: note = a, c, u, g, unknown, or other
  misc_difference 7: note = a, c, u, g, unknown, or other
  misc_difference 8: note = a, c, u, g, unknown, or other
  misc_difference 9: note = a, c, u, g, unknown, or other
  misc_difference 10: note = a, c, u, g, unknown, or other
  misc_difference 12: note = a, c, u, g, unknown, or other
  misc_difference 13: note = a, c, u, g, unknown, or other
  misc_difference 14: note = a, c, u, g, unknown, or other
  misc_difference 15: note = a, c, u, g, unknown, or other
  misc_difference 16: note = a, c, u, g, unknown, or other
  misc_difference 29: note = a, c, u, g, unknown, or other
  misc_difference 31: note = a, c, u, g, unknown, or other
  misc_difference 34: note = a, c, u, g, unknown, or other
  misc_difference 35: note = a, c, u, g, unknown, or other
  misc_difference 37: note = a, c, u, g, unknown, or other
  misc_difference 38: note = a, c, u, g, unknown, or other
  misc_difference 48: note = a, c, u, g, unknown, or other
  misc_difference 79: note = a, c, u, g, unknown, or other
  misc_difference 80: note = a, c, u, g, unknown, or other
  misc_difference 81: note = a, c, u, g, unknown, or other
  misc_difference 82: note = a, c, u, g, unknown, or other
  misc_difference 83: note = a, c, u, g, unknown, or other
  misc_difference 84: note = a, c, u, g, unknown, or other
  misc_difference 85: note = a, c, u, g, unknown, or other
  misc_difference 86: note = a, c, u, g, unknown, or other
  misc_difference 89: note = a, c, u, g, unknown, or other
  misc_difference 91: note = a, c, u, g, unknown, or other
  misc_difference 100: note = a, c, u, g, unknown, or other
  misc_difference 101: note = a, c, u, g, unknown, or other
  misc_difference 103: note = a, c, u, g, unknown, or other
  misc_difference 104: note = a, c, u, g, unknown, or other
  misc_difference 105: note = a, c, u, g, unknown, or other
  misc_difference 106: note = a, c, u, g, unknown, or other
  misc_difference 107: note = a, c, u, g, unknown, or other
  misc_difference 108: note = a, c, u, g, unknown, or other
  misc_difference 109: note = a, c, u, g, unknown, or other
  misc_difference 118: note = a, c, u, g, unknown, or other
  misc_difference 132: note = a, c, u, g, unknown, or other
  misc_difference 152: note = a, c, u, g, unknown, or other
  misc_difference 153: note = a, c, u, g, unknown, or other
  misc_difference 154: note = a, c, u, g, unknown, or other
  misc_difference 155: note = a, c, u, g, unknown, or other
  misc_difference 161: note = a, c, u, g, unknown, or other
  misc_difference 162: note = a, c, u, g, unknown, or other
  misc_difference 163: note = a, c, u, g, unknown, or other
  misc_difference 164: note = a, c, u, g, unknown, or other
  misc_difference 165: note = a, c, u, g, unknown, or other
  misc_difference 180: note = a, c, u, g, unknown, or other
  misc_difference 189: note = a, c, u, g, unknown, or other
  misc_difference 190: note = a, c, u, g, unknown, or other
  misc_difference 191: note = a, c, u, g, unknown, or other
  misc_difference 195: note = a, c, u, g, unknown, or other
  misc_difference 196: note = a, c, u, g, unknown, or other
  misc_difference 197: note = a, c, u, g, unknown, or other
  misc_difference 203: note = a, c, u, g, unknown, or other
  misc_difference 204: note = a, c, u, g, unknown, or other
  misc_difference 207: note = a, c, u, g, unknown, or other
  misc_difference 208: note = a, c, u, g, unknown, or other
  misc_difference 210: note = a, c, u, g, unknown, or other
  misc_difference 211: note = a, c, u, g, unknown, or other
  misc_difference 212: note = a, c, u, g, unknown, or other
  misc_difference 215: note = a, c, u, g, unknown, or other
  misc_difference 216: note = a, c, u, g, unknown, or other
  misc_difference 221: note = a, c, u, g, unknown, or other
  misc_difference 222: note = a, c, u, g, unknown, or other
  misc_difference 223: note = a, c, u, g, unknown, or other
  misc_difference 225: note = a, c, u, g, unknown, or other
  misc_difference 226: note = a, c, u, g, unknown, or other
  misc_difference 227: note = a, c, u, g, unknown, or other
  misc_difference 231: note = a, c, u, g, unknown, or other
rnnrrnnnnnynnnnnrgttgygcargynrnyrnnynnrtgatggcrnracaggtyggaccgygrrrrrryrarcctgnnnnnnnnyyngnrcytyragnncnnnnnnnagatgaggnyyyyyycrgcgrantycatcrgggccrgcrgrynnnnycygcnnnnnaggccggatataagncygcarccnnnyyynnnyrycrnnrynnrnnnrynncytgnnnrnnngggnggcgyccata

SEQ ID NO: 795514 - RNA, 165 nt, unidentified
  source 1..165: mol_type = unassigned RNA; note = ISSsu10
  misc_difference 1: note = a, c, u, g, unknown, or other
  misc_difference 2: note = a, c, u, g, unknown, or other
  misc_difference 3: note = a, c, u, g, unknown, or other
  misc_difference 4: note = a, c, u, g, unknown, or other
  misc_difference 5: note = a, c, u, g, unknown, or other
  misc_difference 6: note = a, c, u, g, unknown, or other
  misc_difference 7: note = a, c, u, g, unknown, or other
  misc_difference 10: note = a, c, u, g, unknown, or other
  misc_difference 12: note = a, c, u, g, unknown, or other
  misc_difference 14: note = a, c, u, g, unknown, or other
  misc_difference 16: note = a, c, u, g, unknown, or other
  misc_difference 17: note = a, c, u, g, unknown, or other
  misc_difference 18: note = a, c, u, g, unknown, or other
  misc_difference 20: note = a, c, u, g, unknown, or other
  misc_difference 25: note = a, c, u, g, unknown, or other
  misc_difference 26: note = a, c, u, g, unknown, or other
  misc_difference 27: note = a, c, u, g, unknown, or other
  misc_difference 28: note = a, c, u, g, unknown, or other
  misc_difference 29: note = a, c, u, g, unknown, or other
  misc_difference 30: note = a, c, u, g, unknown, or other
  misc_difference 31: note = a, c, u, g, unknown, or other
  misc_difference 32: note = a, c, u, g, unknown, or other
  misc_difference 33: note = a, c, u, g, unknown, or other
  misc_difference 40: note = a, c, u, g, unknown, or other
  misc_difference 41: note = a, c, u, g, unknown, or other
  misc_difference 42: note = a, c, u, g, unknown, or other
  misc_difference 43: note = a, c, u, g, unknown, or other
  misc_difference 45: note = a, c, u, g, unknown, or other
  misc_difference 50: note = a, c, u, g, unknown, or other
  misc_difference 51: note = a, c, u, g, unknown, or other
  misc_difference 52: note = a, c, u, g, unknown, or other
  misc_difference 53: note = a, c, u, g, unknown, or other
  misc_difference 54: note = a, c, u, g, unknown, or other
  misc_difference 55: note = a, c, u, g, unknown, or other
  misc_difference 58: note = a, c, u, g, unknown, or other
  misc_difference 64: note = a, c, u, g, unknown, or other
  misc_difference 65: note = a, c, u, g, unknown, or other
  misc_difference 66: note = a, c, u, g, unknown, or other
  misc_difference 67: note = a, c, u, g, unknown, or other
  misc_difference 68: note = a, c, u, g, unknown, or other
  misc_difference 70: note = a, c, u, g, unknown, or other
  misc_difference 72: note = a, c, u, g, unknown, or other
  misc_difference 74: note = a, c, u, g, unknown, or other
  misc_difference 75: note = a, c, u, g, unknown, or other
  misc_difference 76: note = a, c, u, g, unknown, or other
  misc_difference 83: note = a, c, u, g, unknown, or other
  misc_difference 84: note = a, c, u, g, unknown, or other
  misc_difference 86: note = a, c, u, g, unknown, or other
  misc_difference 87: note = a, c, u, g, unknown, or other
  misc_difference 89: note = a, c, u, g, unknown, or other
  misc_difference 93: note = a, c, u, g, unknown, or other
  misc_difference 97: note = a, c, u, g, unknown, or other
  misc_difference 98: note = a, c, u, g, unknown, or other
  misc_difference 106: note = a, c, u, g, unknown, or other
  misc_difference 108: note = a, c, u, g, unknown, or other
  misc_difference 110: note = a, c, u, g, unknown, or other
  misc_difference 111: note = a, c, u, g, unknown, or other
  misc_difference 115: note = a, c, u, g, unknown, or other
  misc_difference 117: note = a, c, u, g, unknown, or other
  misc_difference 119: note = a, c, u, g, unknown, or other
  misc_difference 120: note = a, c, u, g, unknown, or other
  misc_difference 121: note = a, c, u, g, unknown, or other
  misc_difference 122: note = a, c, u, g, unknown, or other
  misc_difference 124: note = a, c, u, g, unknown, or other
  misc_difference 125: note = a, c, u, g, unknown, or other
  misc_difference 128: note = a, c, u, g, unknown, or other
  misc_difference 129: note = a, c, u, g, unknown, or other
  misc_difference 132: note = a, c, u, g, unknown, or other
  misc_difference 133: note = a, c, u, g, unknown, or other
  misc_difference 135: note = a, c, u, g, unknown, or other
  misc_difference 136: note = a, c, u, g, unknown, or other
  misc_difference 137: note = a, c, u, g, unknown, or other
  misc_difference 139: note = a, c, u, g, unknown, or other
  misc_difference 141: note = a, c, u, g, unknown, or other
  misc_difference 143: note = a, c, u, g, unknown, or other
  misc_difference 144: note = a, c, u, g, unknown, or other
  misc_difference 145: note = a, c, u, g, unknown, or other
  misc_difference 146: note = a, c, u, g, unknown, or other
  misc_difference 147: note = a, c, u, g, unknown, or other
  misc_difference 148: note = a, c, u, g, unknown, or other
  misc_difference 149: note = a, c, u, g, unknown, or other
  misc_difference 150: note = a, c, u, g, unknown, or other
  misc_difference 151: note = a, c, u, g, unknown, or other
  misc_difference 152: note = a, c, u, g, unknown, or other
  misc_difference 153: note = a, c, u, g, unknown, or other
  misc_difference 154: note = a, c, u, g, unknown, or other
  misc_difference 155: note = a, c, u, g, unknown, or other
  misc_difference 156: note = a, c, u, g, unknown, or other
  misc_difference 161: note = a, c, u, g, unknown, or other
  misc_difference 162: note = a, c, u, g, unknown, or other
  misc_difference 163: note = a, c, u, g, unknown, or other
  misc_difference 164: note = a, c, u, g, unknown, or other
  misc_difference 165: note = a, c, u, g, unknown, or other
nnnnnnnrynrnynrnnnanrycgnnnnnnnnntggyrynnnnanycygnnnnnnarnyygrynnnnnrnrnynnnrrgyacnnynnantgtngcynngagcacgnrnannarantnynnnnynnrrnnrynnynnnynrnynnnnnnnnnnnnnnrgrgnnnnn

SEQ ID NO: 795515 - RNA, 221 nt, unidentified
  source 1..221: mol_type = unassigned RNA; note = ISCro5
  misc_difference 1: note = a, c, u, g, unknown, or other
  misc_difference 3: note = a, c, u, g, unknown, or other
  misc_difference 11: note = a, c, u, g, unknown, or other
  misc_difference 14: note = a, c, u, g, unknown, or other
  misc_difference 15: note = a, c, u, g, unknown, or other
  misc_difference 16: note = a, c, u, g, unknown, or other
  misc_difference 17: note = a, c, u, g, unknown, or other
  misc_difference 18: note = a, c, u, g, unknown, or other
  misc_difference 19: note = a, c, u, g, unknown, or other
  misc_difference 20: note = a, c, u, g, unknown, or other
  misc_difference 21: note = a, c, u, g, unknown, or other
  misc_difference 23: note = a, c, u, g, unknown, or other
  misc_difference 34: note = a, c, u, g, unknown, or other
  misc_difference 35: note = a, c, u, g, unknown, or other
  misc_difference 51: note = a, c, u, g, unknown, or other
  misc_difference 52: note = a, c, u, g, unknown, or other
  misc_difference 53: note = a, c, u, g, unknown, or other
  misc_difference 54: note = a, c, u, g, unknown, or other
  misc_difference 57: note = a, c, u, g, unknown, or other
  misc_difference 62: note = a, c, u, g, unknown, or other
  misc_difference 63: note = a, c, u, g, unknown, or other
  misc_difference 64: note = a, c, u, g, unknown, or other
  misc_difference 65: note = a, c, u, g, unknown, or other
  misc_difference 66: note = a, c, u, g, unknown, or other
  misc_difference 67: note = a, c, u, g, unknown, or other
  misc_difference 68: note = a, c, u, g, unknown, or other
  misc_difference 71: note = a, c, u, g, unknown, or other
  misc_difference 72: note = a, c, u, g, unknown, or other
  misc_difference 75: note = a, c, u, g, unknown, or other
  misc_difference 77: note = a, c, u, g, unknown, or other
  misc_difference 78: note = a, c, u, g, unknown, or other
  misc_difference 79: note = a, c, u, g, unknown, or other
  misc_difference 80: note = a, c, u, g, unknown, or other
  misc_difference 84: note = a, c, u, g, unknown, or other
  misc_difference 88: note = a, c, u, g, unknown, or other
  misc_difference 89: note = a, c, u, g, unknown, or other
  misc_difference 92: note = a, c, u, g, unknown, or other
  misc_difference 93: note = a, c, u, g, unknown, or other
  misc_difference 98: note = a, c, u, g, unknown, or other
  misc_difference 102: note = a, c, u, g, unknown, or other
  misc_difference 103: note = a, c, u, g, unknown, or other
  misc_difference 104: note = a, c, u, g, unknown, or other
  misc_difference 105: note = a, c, u, g, unknown, or other
  misc_difference 106: note = a, c, u, g, unknown, or other
  misc_difference 110: note = a, c, u, g, unknown, or other
  misc_difference 116: note = a, c, u, g, unknown, or other
  misc_difference 117: note = a, c, u, g, unknown, or other
  misc_difference 125: note = a, c, u, g, unknown, or other
  misc_difference 130: note = a, c, u, g, unknown, or other
  misc_difference 132: note = a, c, u, g, unknown, or other
  misc_difference 134: note = a, c, u, g, unknown, or other
  misc_difference 135: note = a, c, u, g, unknown, or other
  misc_difference 136: note = a, c, u, g, unknown, or other
  misc_difference 137: note = a, c, u, g, unknown, or other
  misc_difference 139: note = a, c, u, g, unknown, or other
  misc_difference 140: note = a, c, u, g, unknown, or other
  misc_difference 141: note = a, c, u, g, unknown, or other
  misc_difference 143: note = a, c, u, g, unknown, or other
  misc_difference 145: note = a, c, u, g, unknown, or other
  misc_difference 146: note = a, c, u, g, unknown, or other
  misc_difference 147: note = a, c, u, g, unknown, or other
  misc_difference 148: note = a, c, u, g, unknown, or other
  misc_difference 149: note = a, c, u, g, unknown, or other
  misc_difference 150: note = a, c, u, g, unknown, or other
  misc_difference 151: note = a, c, u, g, unknown, or other
  misc_difference 166: note = a, c, u, g, unknown, or other
  misc_difference 167: note = a, c, u, g, unknown, or other
  misc_difference 168: note = a, c, u, g, unknown, or other
  misc_difference 176: note = a, c, u, g, unknown, or other
  misc_difference 178: note = a, c, u, g, unknown, or other
  misc_difference 180: note = a, c, u, g, unknown, or other
  misc_difference 181: note = a, c, u, g, unknown, or other
  misc_difference 182: note = a, c, u, g, unknown, or other
  misc_difference 183: note = a, c, u, g, unknown, or other
  misc_difference 184: note = a, c, u, g, unknown, or other
  misc_difference 188: note = a, c, u, g, unknown, or other
  misc_difference 189: note = a, c, u, g, unknown, or other
  misc_difference 190: note = a, c, u, g, unknown, or other
  misc_difference 191: note = a, c, u, g, unknown, or other
  misc_difference 193: note = a, c, u, g, unknown, or other
  misc_difference 194: note = a, c, u, g, unknown, or other
  misc_difference 195: note = a, c, u, g, unknown, or other
  misc_difference 196: note = a, c, u, g, unknown, or other
  misc_difference 197: note = a, c, u, g, unknown, or other
  misc_difference 198: note = a, c, u, g, unknown, or other
  misc_difference 199: note = a, c, u, g, unknown, or other
  misc_difference 200: note = a, c, u, g, unknown, or other
  misc_difference 203: note = a, c, u, g, unknown, or other
  misc_difference 208: note = a, c, u, g, unknown, or other
  misc_difference 209: note = a, c, u, g, unknown, or other
  misc_difference 214: note = a, c, u, g, unknown, or other
  misc_difference 215: note = a, c, u, g, unknown, or other
  misc_difference 217: note = a, c, u, g, unknown, or other
nrnrrttgcrnrrnnnnnnnnrnygatggyrrannggtyrrrccgrcryynnnnranycygnnnnnnnyrnngrncnnnnrarnycgnnrrnnygrtnrgrnnnnnrygngcgrannyccatyrnggcyngnrnnnnrnnnyncnnnnnnnargccggatataygnnngcartygnrnynnnnnycrnnnnynnnnnnnnytngcaannyrggnngngtcc

SEQ ID NO: 795516 - RNA, 206 nt, unidentified
  source 1..206: mol_type = unassigned RNA; note = ISXpo1
  misc_difference 1: note = a, c, u, g, unknown, or other
  misc_difference 2: note = a, c, u, g, unknown, or other
  misc_difference 5: note = a, c, u, g, unknown, or other
  misc_difference 11: note = a, c, u, g, unknown, or other
  misc_difference 12: note = a, c, u, g, unknown, or other
  misc_difference 14: note = a, c, u, g, unknown, or other
  misc_difference 15: note = a, c, u, g, unknown, or other
  misc_difference 16: note = a, c, u, g, unknown, or other
  misc_difference 17: note = a, c, u, g, unknown, or other
  misc_difference 24: note = a, c, u, g, unknown, or other
  misc_difference 25: note = a, c, u, g, unknown, or other
  misc_difference 28: note = a, c, u, g, unknown, or other
  misc_difference 29: note = a, c, u, g, unknown, or other
  misc_difference 33: note = a, c, u, g, unknown, or other
  misc_difference 34: note = a, c, u, g, unknown, or other
  misc_difference 35: note = a, c, u, g, unknown, or other
  misc_difference 36: note = a, c, u, g, unknown, or other
  misc_difference 40: note = a, c, u, g, unknown, or other
  misc_difference 42: note = a, c, u, g, unknown, or other
  misc_difference 45: note = a, c, u, g, unknown, or other
  misc_difference 46: note = a, c, u, g, unknown, or other
  misc_difference 47: note = a, c, u, g, unknown, or other
  misc_difference 49: note = a, c, u, g, unknown, or other
  misc_difference 56: note = a, c, u, g, unknown, or other
  misc_difference 57: note = a, c, u, g, unknown, or other
  misc_difference 58: note = a, c, u, g, unknown, or other
  misc_difference 59: note = a, c, u, g, unknown, or other
  misc_difference 60: note = a, c, u, g, unknown, or other
  misc_difference 61: note = a, c, u, g, unknown, or other
  misc_difference 62: note = a, c, u, g, unknown, or other
  misc_difference 64: note = a, c, u, g, unknown, or other
  misc_difference 65: note = a, c, u, g, unknown, or other
  misc_difference 66: note = a, c, u, g, unknown, or other
  misc_difference 69: note = a, c, u, g, unknown, or other
  misc_difference 71: note = a, c, u, g, unknown, or other
  misc_difference 72: note = a, c, u, g, unknown, or other
  misc_difference 73: note = a, c, u, g, unknown, or other
  misc_difference 77: note = a, c, u, g, unknown, or other
  misc_difference 81: note = a, c, u, g, unknown, or other
  misc_difference 82: note = a, c, u, g, unknown, or other
  misc_difference 83: note = a, c, u, g, unknown, or other
  misc_difference 84: note = a, c, u, g, unknown, or other
  misc_difference 85: note = a, c, u, g, unknown, or other
  misc_difference 86: note = a, c, u, g, unknown, or other
  misc_difference 89: note = a, c, u, g, unknown, or other
  misc_difference 91: note = a, c, u, g, unknown, or other
  misc_difference 95: note = a, c, u, g, unknown, or other
  misc_difference 96: note = a, c, u, g, unknown, or other
  misc_difference 97: note = a, c, u, g, unknown, or other
  misc_difference 98: note = a, c, u, g, unknown, or other
  misc_difference 101: note = a, c, u, g, unknown, or other
  misc_difference 117: note = a, c, u, g, unknown, or other
  misc_difference 121: note = a, c, u, g, unknown, or other
  misc_difference 122: note = a, c, u, g, unknown, or other
  misc_difference 125: note = a, c, u, g, unknown, or other
  misc_difference 126: note = a, c, u, g, unknown, or other
  misc_difference 127: note = a, c, u, g, unknown, or other
  misc_difference 128: note = a, c, u, g, unknown, or other
  misc_difference 129: note = a, c, u, g, unknown, or other
  misc_difference 130: note = a, c, u, g, unknown, or other
  misc_difference 131: note = a, c, u, g, unknown, or other
  misc_difference 132: note = a, c, u, g, unknown, or other
  misc_difference 133: note = a, c, u, g, unknown, or other
  misc_difference 138: note = a, c, u, g, unknown, or other
  misc_difference 139: note = a, c, u, g, unknown, or other
  misc_difference 140: note = a, c, u, g, unknown, or other
  misc_difference 141: note = a, c, u, g, unknown, or other
  misc_difference 142: note = a, c, u, g, unknown, or other
  misc_difference 144: note = a, c, u, g, unknown, or other
  misc_difference 157: note = a, c, u, g, unknown, or other
  misc_difference 158: note = a, c, u, g, unknown, or other
  misc_difference 159: note = a, c, u, g, unknown, or other
  misc_difference 164: note = a, c, u, g, unknown, or other
  misc_difference 168: note = a, c, u, g, unknown, or other
  misc_difference 169: note = a, c, u, g, unknown, or other
  misc_difference 170: note = a, c, u, g, unknown, or other
  misc_difference 171: note = a, c, u, g, unknown, or other
  misc_difference 172: note = a, c, u, g, unknown, or other
  misc_difference 174: note = a, c, u, g, unknown, or other
  misc_difference 175: note = a, c, u, g, unknown, or other
  misc_difference 176: note = a, c, u, g, unknown, or other
  misc_difference 178: note = a, c, u, g, unknown, or other
  misc_difference 179: note = a, c, u, g, unknown, or other
  misc_difference 180: note = a, c, u, g, unknown, or other
  misc_difference 181: note = a, c, u, g, unknown, or other
  misc_difference 182: note = a, c, u, g, unknown, or other
  misc_difference 183: note = a, c, u, g, unknown, or other
  misc_difference 184: note = a, c, u, g, unknown, or other
  misc_difference 185: note = a, c, u, g, unknown, or other
  misc_difference 192: note = a, c, u, g, unknown, or other
  misc_difference 193: note = a, c, u, g, unknown, or other
  misc_difference 194: note = a, c, u, g, unknown, or other
  misc_difference 195: note = a, c, u, g, unknown, or other
  misc_difference 196: note = a, c, u, g, unknown, or other
  misc_difference 197: note = a, c, u, g, unknown, or other
  misc_difference 200: note = a, c, u, g, unknown, or other
  misc_difference 201: note = a, c, u, g, unknown, or other
  misc_difference 202: note = a, c, u, g, unknown, or other
  misc_difference 203: note = a, c, u, g, unknown, or other
  misc_difference 204: note = a, c, u, g, unknown, or other
  misc_difference 205: note = a, c, u, g, unknown, or other
  misc_difference 206: note = a, c, u, g, unknown, or other
nnrrnytgcrnnrnnnnygatgrnnrannggtnnnnycrncnyynnnrnarcctgnnnnnnnynnngrnynnnrarnycgnnnnnnygnynaggnnnnrrngyrcgratyycatyanggcnnrrnnnnnnnnnyycrnnnnnangccgratrtaygnnngyrrnrccnnnnnynnnrnnnnnnnnytygcrnnnnnnrrnnnnnnn

SEQ ID NO: 795517 - RNA, 263 nt, unidentified
  source 1..263: mol_type = unassigned RNA; note = ISShdy1
  misc_difference 1: note = a, c, u, g, unknown, or other
  misc_difference 2: note = a, c, u, g, unknown, or other
  misc_difference 3: note = a, c, u, g, unknown, or other
  misc_difference 4: note = a, c, u, g, unknown, or other
  misc_difference 18: note = a, c, u, g, unknown, or other
  misc_difference 19: note = a, c, u, g, unknown, or other
  misc_difference 20: note = a, c, u, g, unknown, or other
  misc_difference 21: note = a, c, u, g, unknown, or other
  misc_difference 31: note = a, c, u, g, unknown, or other
  misc_difference 33: note = a, c, u, g, unknown, or other
  misc_difference 55: note = a, c, u, g, unknown, or other
  misc_difference 59: note = a, c, u, g, unknown, or other
  misc_difference 63: note = a, c, u, g, unknown, or other
  misc_difference 67: note = a, c, u, g, unknown, or other
  misc_difference 68: note = a, c, u, g, unknown, or other
  misc_difference 71: note = a, c, u, g, unknown, or other
  misc_difference 72: note = a, c, u, g, unknown, or other
  misc_difference 77: note = a, c, u, g, unknown, or other
  misc_difference 78: note = a, c, u, g, unknown, or other
  misc_difference 79: note = a, c, u, g, unknown, or other
  misc_difference 80: note = a, c, u, g, unknown, or other
  misc_difference 81: note = a, c, u, g, unknown, or other
  misc_difference 82: note = a, c, u, g, unknown, or other
  misc_difference 83: note = a, c, u, g, unknown, or other
  misc_difference 84: note = a, c, u, g, unknown, or other
  misc_difference 86: note = a, c, u, g, unknown, or other
  misc_difference 88: note = a, c, u, g, unknown, or other
  misc_difference 89: note = a, c, u, g, unknown, or other
  misc_difference 90: note = a, c, u, g, unknown, or other
  misc_difference 103: note = a, c, u, g, unknown, or other
  misc_difference 108: note = a, c, u, g, unknown, or other
  misc_difference 113: note = a, c, u, g, unknown, or other
  misc_difference 139: note = a, c, u, g, unknown, or other
  misc_difference 142: note = a, c, u, g, unknown, or other
  misc_difference 143: note = a, c, u, g, unknown, or other
  misc_difference 144: note = a, c, u, g, unknown, or other
  misc_difference 145: note = a, c, u, g, unknown, or other
  misc_difference 146: note = a, c, u, g, unknown, or other
  misc_difference 147: note = a, c, u, g, unknown, or other
  misc_difference 150: note = a, c, u, g, unknown, or other
  misc_difference 155: note = a, c, u, g, unknown, or other
  misc_difference 156: note = a, c, u, g, unknown, or other
  misc_difference 164: note = a, c, u, g, unknown, or other
  misc_difference 177: note = a, c, u, g, unknown, or other
  misc_difference 185: note = a, c, u, g, unknown, or other
  misc_difference 189: note = a, c, u, g, unknown, or other
  misc_difference 191: note = a, c, u, g, unknown, or other
  misc_difference 193: note = a, c, u, g, unknown, or other
  misc_difference 195: note = a, c, u, g, unknown, or other
  misc_difference 196: note = a, c, u, g, unknown, or other
  misc_difference 197: note = a, c, u, g, unknown, or other
  misc_difference 202: note = a, c, u, g, unknown, or other
  misc_difference 203: note = a, c, u, g, unknown, or other
  misc_difference 204: note = a, c, u, g, unknown, or other
  misc_difference 205: note = a, c, u, g, unknown, or other
  misc_difference 207: note = a, c, u, g, unknown, or other
  misc_difference 210: note = a, c, u, g, unknown, or other
  misc_difference 211: note = a, c, u, g, unknown, or other
  misc_difference 214: note = a, c, u, g, unknown, or other
  misc_difference 217: note = a, c, u, g, unknown, or other
  misc_difference 218: note = a, c, u, g, unknown, or other
  misc_difference 219: note = a, c, u, g, unknown, or other
  misc_difference 220: note = a, c, u, g, unknown, or other
  misc_difference 221: note = a, c, u, g, unknown, or other
  misc_difference 222: note = a, c, u, g, unknown, or other
  misc_difference 223: note = a, c, u, g, unknown, or other
  misc_difference 224: note = a, c, u, g, unknown, or other
  misc_difference 225: note = a, c, u, g, unknown, or other
  misc_difference 226: note = a, c, u, g, unknown, or other
  misc_difference 228: note = a, c, u, g, unknown, or other
  misc_difference 229: note = a, c, u, g, unknown, or other
  misc_difference 230: note = a, c, u, g, unknown, or other
  misc_difference 231: note = a, c, u, g, unknown, or other
  misc_difference 233: note = a, c, u, g, unknown, or other
  misc_difference 235: note = a, c, u, g, unknown, or other
  misc_difference 241: note = a, c, u, g, unknown, or other
  misc_difference 242: note = a, c, u, g, unknown, or other
  misc_difference 243: note = a, c, u, g, unknown, or other
  misc_difference 250: note = a, c, u, g, unknown, or other
  misc_difference 251: note = a, c, u, g, unknown, or other
  misc_difference 253: note = a, c, u, g, unknown, or other
  misc_difference 254: note = a, c, u, g, unknown, or other
  misc_difference 255: note = a, c, u, g, unknown, or other
  misc_difference 256: note = a, c, u, g, unknown, or other
  misc_difference 257: note = a, c, u, g, unknown, or other
  misc_difference 260: note = a, c, u, g, unknown, or other
  misc_difference 261: note = a, c, u, g, unknown, or other
  misc_difference 262: note = a, c, u, g, unknown, or other
  misc_difference 263: note = a, c, u, g, unknown, or other
nnnnycrccgygtgaygnnnnrygttgatgngnrraggttggacctgcgcrgggnrtgnyygnyyannyynnggrgnnnnnnnnrnynnncycgryyarcgantgrgnccyyngcgygcgtcttycatcagggtcygyngynnnnnnrcnryrynnatgaccgnttgtagyyyyrcngtccrcancyynynynynnncrrcnnnnrnyrnnyrnyrnnnnnnnnnnrnnnnrnynrryygnnnyrcrrynnrnnnnnrrnnnn

SEQ ID NO: 795518 - RNA, 192 nt, unidentified
  source 1..192: mol_type = unassigned RNA; note = 7a4993
  misc_difference 12: note = a, c, u, g, unknown, or other
  misc_difference 13: note = a, c, u, g, unknown, or other
  misc_difference 16: note = a, c, u, g, unknown, or other
  misc_difference 19: note = a, c, u, g, unknown, or other
  misc_difference 20: note = a, c, u, g, unknown, or other
  misc_difference 26: note = a, c, u, g, unknown, or other
  misc_difference 27: note = a, c, u, g, unknown, or other
  misc_difference 30: note = a, c, u, g, unknown, or other
  misc_difference 31: note = a, c, u, g, unknown, or other
  misc_difference 32: note = a, c, u, g, unknown, or other
  misc_difference 39: note = a, c, u, g, unknown, or other
  misc_difference 40: note = a, c, u, g, unknown, or other
  misc_difference 41: note = a, c, u, g, unknown, or other
  misc_difference 42: note = a, c, u, g, unknown, or other
  misc_difference 43: note = a, c, u, g, unknown, or other
  misc_difference 44: note = a, c, u, g, unknown, or other
  misc_difference 45: note = a, c, u, g, unknown, or other
  misc_difference 46: note = a, c, u, g, unknown, or other
  misc_difference 47: note = a, c, u, g, unknown, or other
  misc_difference 49: note = a, c, u, g, unknown, or other
  misc_difference 53: note = a, c, u, g, unknown, or other
  misc_difference 55: note = a, c, u, g, unknown, or other
  misc_difference 56: note = a, c, u, g, unknown, or other
  misc_difference 57: note = a, c, u, g, unknown, or other
  misc_difference 58: note = a, c, u, g, unknown, or other
  misc_difference 71: note = a, c, u, g, unknown, or other
  misc_difference 75: note = a, c, u, g, unknown, or other
  misc_difference 76: note = a, c, u, g, unknown, or other
  misc_difference 82: note = a, c, u, g, unknown, or other
  misc_difference 85: note = a, c, u, g, unknown, or other
  misc_difference 89: note = a, c, u, g, unknown, or other
  misc_difference 91: note = a, c, u, g, unknown, or other
  misc_difference 95: note = a, c, u, g, unknown, or other
  misc_difference 98: note = a, c, u, g, unknown, or other
  misc_difference 99: note = a, c, u, g, unknown, or other
  misc_difference 101: note = a, c, u, g, unknown, or other
  misc_difference 104: note = a, c, u, g, unknown, or other
  misc_difference 105: note = a, c, u, g, unknown, or other
  misc_difference 106: note = a, c, u, g, unknown, or other
  misc_difference 113: note = a, c, u, g, unknown, or other
  misc_difference 114: note = a, c, u, g, unknown, or other
  misc_difference 115: note = a, c, u, g, unknown, or other
  misc_difference 116: note = a, c, u, g, unknown, or other
  misc_difference 117: note = a, c, u, g, unknown, or other
  misc_difference 118: note = a, c, u, g, unknown, or other
  misc_difference 119: note = a, c, u, g, unknown, or other
  misc_difference 120: note = a, c, u, g, unknown, or other
  misc_difference 121: note = a, c, u, g, unknown, or other
  misc_difference 122: note = a, c, u, g, unknown, or other
  misc_difference 123: note = a, c, u, g, unknown, or other
  misc_difference 124: note = a, c, u, g, unknown, or other
  misc_difference 125: note = a, c, u, g, unknown, or other
  misc_difference 126: note = a, c, u, g, unknown, or other
  misc_difference 127: note = a, c, u, g, unknown, or other
  misc_difference 138: note = a, c, u, g, unknown, or other
  misc_difference 141: note = a, c, u, g, unknown, or other
  misc_difference 142: note = a, c, u, g, unknown, or other
  misc_difference 143: note = a, c, u, g, unknown, or other
  misc_difference 149: note = a, c, u, g, unknown, or other
  misc_difference 150: note = a, c, u, g, unknown, or other
  misc_difference 151: note = a, c, u, g, unknown, or other
  misc_difference 153: note = a, c, u, g, unknown, or other
  misc_difference 154: note = a, c, u, g, unknown, or other
  misc_difference 155: note = a, c, u, g, unknown, or other
  misc_difference 156: note = a, c, u, g, unknown, or other
  misc_difference 157: note = a, c, u, g, unknown, or other
  misc_difference 158: note = a, c, u, g, unknown, or other
  misc_difference 159: note = a, c, u, g, unknown, or other
  misc_difference 165: note = a, c, u, g, unknown, or other
  misc_difference 166: note = a, c, u, g, unknown, or other
  misc_difference 169: note = a, c, u, g, unknown, or other
  misc_difference 170: note = a, c, u, g, unknown, or other
  misc_difference 171: note = a, c, u, g, unknown, or other
  misc_difference 172: note = a, c, u, g, unknown, or other
  misc_difference 173: note = a, c, u, g, unknown, or other
  misc_difference 177: note = a, c, u, g, unknown, or other
  misc_difference 180: note = a, c, u, g, unknown, or other
  misc_difference 189: note = a, c, u, g, unknown, or other
  misc_difference 192: note = a, c, u, g, unknown, or other
aytttggrrygnngrngynnryccgnnrynnnrcctgrnnnnnnnnnrnycgnynnnnagatyggrcygcnyyynngytccncynycynrnyygnaynnrncannnygyrcynnnnnnnnnnnnnnngyrcggatagnagnnnrrgcynnngnnnnnnnycrrcnngynnnnnrrgnggnrrcgyyccnrrn

SEQ ID NO: 795519 - RNA, 164 nt, unidentified
  source 1..164: mol_type = unassigned RNA; note = 0a0da1
  misc_difference 1: note = a, c, u, g, unknown, or other
  misc_difference 2: note = a, c, u, g, unknown, or other
  misc_difference 5: note = a, c, u, g, unknown, or other
  misc_difference 10: note = a, c, u, g, unknown, or other
  misc_difference 12: note = a, c, u, g, unknown, or other
  misc_difference 13: note = a, c, u, g, unknown, or other
  misc_difference 16: note = a, c, u, g, unknown, or other
  misc_difference 17: note = a, c, u, g, unknown, or other
  misc_difference 24: note = a, c, u, g, unknown, or other
  misc_difference 29: note = a, c, u, g, unknown, or other
  misc_difference 30: note = a, c, u, g, unknown, or other
  misc_difference 31: note = a, c, u, g, unknown, or other
  misc_difference 32: note = a, c, u, g, unknown, or other
  misc_difference 33: note = a, c, u, g, unknown, or other
  misc_difference 34: note = a, c, u, g, unknown, or other
  misc_difference 36: note = a, c, u, g, unknown, or other
  misc_difference 37: note = a, c, u, g, unknown, or other
  misc_difference 39: note = a, c, u, g, unknown, or other
  misc_difference 44: note = a, c, u, g, unknown, or other
  misc_difference 45: note = a, c, u, g, unknown, or other
  misc_difference 46: note = a, c, u, g, unknown, or other
  misc_difference 47: note = a, c, u, g, unknown, or other
  misc_difference 55: note = a, c, u, g, unknown, or other
  misc_difference 56: note = a, c, u, g, unknown, or other
  misc_difference 57: note = a, c, u, g, unknown, or other
  misc_difference 58: note = a, c, u, g, unknown, or other
  misc_difference 59: note = a, c, u, g, unknown, or other
  misc_difference 61: note = a, c, u, g, unknown, or other
  misc_difference 62: note = a, c, u, g, unknown, or other
  misc_difference 64: note = a, c, u, g, unknown, or other
  misc_difference 67: note = a, c, u, g, unknown, or other
  misc_difference 72: note = a, c, u, g, unknown, or other
  misc_difference 73: note = a, c, u, g, unknown, or other
  misc_difference 76: note = a, c, u, g, unknown, or other
  misc_difference 77: note = a, c, u, g, unknown, or other
  misc_difference 79: note = a, c, u, g, unknown, or other
  misc_difference 80: note = a, c, u, g, unknown, or other
  misc_difference 81: note = a, c, u, g, unknown, or other
  misc_difference 82: note = a, c, u, g, unknown, or other
  misc_difference 83: note = a, c, u, g, unknown, or other
  misc_difference 87: note = a, c, u, g, unknown, or other
  misc_difference 88: note = a, c, u, g, unknown, or other
  misc_difference 89: note = a, c, u, g, unknown, or other
  misc_difference 90: note = a, c, u, g, unknown, or other
  misc_difference 93: note = a, c, u, g, unknown, or other
  misc_difference 94: note = a, c, u, g, unknown, or other
  misc_difference 98: note = a, c, u, g, unknown, or other
  misc_difference 105: note = a, c, u, g, unknown, or other
  misc_difference 106: note = a, c, u, g, unknown, or other
  misc_difference 108: note = a, c, u, g, unknown, or other
  misc_difference 113: note = a, c, u, g, unknown, or other
  misc_difference 114: note = a, c, u, g, unknown, or other
  misc_difference 115: note = a, c, u, g, unknown, or other
  misc_difference 126: note = a, c, u, g, unknown, or other
  misc_difference 127: note = a, c, u, g, unknown, or other
  misc_difference 132: note = a, c, u, g, unknown, or other
  misc_difference 133: note = a, c, u, g, unknown, or other
  misc_difference 138: note = a, c, u, g, unknown, or other
  misc_difference 139: note = a, c, u, g, unknown, or other
  misc_difference 140: note = a, c, u, g, unknown, or other
  misc_difference 141: note = a, c, u, g, unknown, or other
  misc_difference 142: note = a, c, u, g, unknown, or other
  misc_difference 143: note = a, c, u, g, unknown, or other
  misc_difference 144: note = a, c, u, g, unknown, or other
  misc_difference 148: note = a, c, u, g, unknown, or other
  misc_difference 149: note = a, c, u, g, unknown, or other
  misc_difference 150: note = a, c, u, g, unknown, or other
  misc_difference 151: note = a, c, u, g, unknown, or other
  misc_difference 152: note = a, c, u, g, unknown, or other
  misc_difference 153: note = a, c, u, g, unknown, or other
  misc_difference 160: note = a, c, u, g, unknown, or other
  misc_difference 161: note = a, c, u, g, unknown, or other
  misc_difference 162: note = a, c, u, g, unknown, or other
  misc_difference 163: note = a, c, u, g, unknown, or other
  misc_difference 164: note = a, c, u, g, unknown, or other
nnrrnyyrrnrnnrrnnrrrgyrnaytannnnnnynncnargynnnnrrcytaynnnnngnntnarnccyynnyynnynnnnnyyrnnnnrrnnycanatagaanntnrrgynnnrrrcyyattannaaggnnttrrnnnnnnnyrrnnnnnnyyrryynnnnn

SEQ ID NO: 795520 - RNA, 170 nt, unidentified
  source 1..170: mol_type = unassigned RNA; note = d18565
  misc_difference 2: note = a, c, u, g, unknown, or other
  misc_difference 4: note = a, c, u, g, unknown, or other
  misc_difference 5: note = a, c, u, g, unknown, or other
  misc_difference 6: note = a, c, u, g, unknown, or other
  misc_difference 10: note = a, c, u, g, unknown, or other
  misc_difference 12: note = a, c, u, g, unknown, or other
  misc_difference 14: note = a, c, u, g, unknown, or other
  misc_difference 20: note = a, c, u, g, unknown, or other
  misc_difference 21: note = a, c, u, g, unknown, or other
  misc_difference 22: note = a, c, u, g, unknown, or other
  misc_difference 23: note = a, c, u, g, unknown, or other
  misc_difference 24: note = a, c, u, g, unknown, or other
  misc_difference 27: note = a, c, u, g, unknown, or other
  misc_difference 31: note = a, c, u, g, unknown, or other
  misc_difference 32: note = a, c, u, g, unknown, or other
  misc_difference 33: note = a, c, u, g, unknown, or other
  misc_difference 34: note = a, c, u, g, unknown, or other
  misc_difference 35: note = a, c, u, g, unknown, or other
  misc_difference 36: note = a, c, u, g, unknown, or other
  misc_difference 37: note = a, c, u, g, unknown, or other
  misc_difference 38: note = a, c, u, g, unknown, or other
  misc_difference 39: note = a, c, u, g, unknown, or other
  misc_difference 46: note = a, c, u, g, unknown, or other
  misc_difference 47: note = a, c, u, g, unknown, or other
  misc_difference 48: note = a, c, u, g, unknown, or other
  misc_difference 49: note = a, c, u, g, unknown, or other
  misc_difference 59: note = a, c, u, g, unknown, or other
  misc_difference 60: note = a, c, u, g, unknown, or other
  misc_difference 61: note = a, c, u, g, unknown, or other
  misc_difference 66: note = a, c, u, g, unknown, or other
  misc_difference 70: note = a, c, u, g, unknown, or other
  misc_difference 71: note = a, c, u, g, unknown, or other
  misc_difference 73: note = a, c, u, g, unknown, or other
  misc_difference 75: note = a, c, u, g, unknown, or other
  misc_difference 76: note = a, c, u, g, unknown, or other
  misc_difference 77: note = a, c, u, g, unknown, or other
  misc_difference 78: note = a, c, u, g, unknown, or other
  misc_difference 79: note = a, c, u, g, unknown, or other
  misc_difference 80: note = a, c, u, g, unknown, or other
  misc_difference 81: note = a, c, u, g, unknown, or other
  misc_difference 82: note = a, c, u, g, unknown, or other
  misc_difference 86: note = a, c, u, g, unknown, or other
  misc_difference 87: note = a, c, u, g, unknown, or other
  misc_difference 88: note = a, c, u, g, unknown, or other
  misc_difference 89: note = a, c, u, g, unknown, or other
  misc_difference 90: note = a, c, u, g, unknown, or other
  misc_difference 91: note = a, c, u, g, unknown, or other
  misc_difference 92: note = a, c, u, g, unknown, or other
  misc_difference 97: note = a, c, u, g, unknown, or other
  misc_difference 101: note = a, c, u, g, unknown, or other
  misc_difference 102: note = a, c, u, g, unknown, or other
  misc_difference 103: note = a, c, u, g, unknown, or other
  misc_difference 104: note = a, c, u, g, unknown, or other
  misc_difference 105: note = a, c, u, g, unknown, or other
  misc_difference 106: note = a, c, u, g, unknown, or other
  misc_difference 107: note = a, c, u, g, unknown, or other
  misc_difference 108: note = a, c, u, g, unknown, or other
  misc_difference 109: note = a, c, u, g, unknown, or other
  misc_difference 110: note = a, c, u, g, unknown, or other
  misc_difference 111: note = a, c, u, g, unknown, or other
  misc_difference 112: note = a, c, u, g, unknown, or other
  misc_difference 113: note = a, c, u, g, unknown, or other
  misc_difference 114: note = a, c, u, g, unknown, or other
  misc_difference 118: note = a, c, u, g, unknown, or other
  misc_difference 125: note = a, c, u, g, unknown, or other
  misc_difference 129: note = a, c, u, g, unknown, or other
  misc_difference 130: note = a, c, u, g, unknown, or other
  misc_difference 133: note = a, c, u, g, unknown, or other
  misc_difference 134: note = a, c, u, g, unknown, or other
  misc_difference 135: note = a, c, u, g, unknown, or other
  misc_difference 136: note = a, c, u, g, unknown, or other
  misc_difference 137: note = a, c, u, g, unknown, or other
  misc_difference 138: note = a, c, u, g, unknown, or other
  misc_difference 139: note = a, c, u, g, unknown, or other
  misc_difference 140: note = a, c, u, g, unknown, or other
  misc_difference 141: note = a, c, u, g, unknown, or other
  misc_difference 142: note = a, c, u, g, unknown, or other
  misc_difference 146: note = a, c, u, g, unknown, or other
  misc_difference 147: note = a, c, u, g, unknown, or other
  misc_difference 149: note = a, c, u, g, unknown, or other
  misc_difference 150: note = a, c, u, g, unknown, or other
  misc_difference 151: note = a, c, u, g, unknown, or other
  misc_difference 156: note = a, c, u, g, unknown, or other
  misc_difference 157: note = a, c, u, g, unknown, or other
  misc_difference 158: note = a, c, u, g, unknown, or other
  misc_difference 159: note = a, c, u, g, unknown, or other
  misc_difference 163: note = a, c, u, g, unknown, or other
  misc_difference 166: note = a, c, u, g, unknown, or other
  misc_difference 167: note = a, c, u, g, unknown, or other
  misc_difference 168: note = a, c, u, g, unknown, or other
  misc_difference 169: note = a, c, u, g, unknown, or other
  misc_difference 170: note = a, c, u, g, unknown, or other
ynrnnnrrrnrnrnyrrrynnnnnarnccgnnnnnnnnntggygynnnnraryccgyynnnragyntggnnynrnnnnnnnnygrnnnnnnnattrnygrnnnnnnnnnnnnnnaycnygyttrnragnntrnnnnnnnnnnrrynnynnngyyynnnnyrynyynnnnn

SEQ ID NO: 795521 - RNA, 284 nt, unidentified
  source 1..284: mol_type = unassigned RNA; note = 3605de
  misc_difference 1: note = a, c, u, g, unknown, or other
  misc_difference 2: note = a, c, u, g, unknown, or other
  misc_difference 3: note = a, c, u, g, unknown, or other
  misc_difference 4: note = a, c, u, g, unknown, or other
  misc_difference 5: note = a, c, u, g, unknown, or other
  misc_difference 7: note = a, c, u, g, unknown, or other
  misc_difference 8: note = a, c, u, g, unknown, or other
  misc_difference 9: note = a, c, u, g, unknown, or other
  misc_difference 10: note = a, c, u, g, unknown, or other
  misc_difference 11: note = a, c, u, g, unknown, or other
  misc_difference 12: note = a, c, u, g, unknown, or other
  misc_difference 13: note = a, c, u, g, unknown, or other
  misc_difference 14: note = a, c, u, g, unknown, or other
  misc_difference 15: note = a, c, u, g, unknown, or other
  misc_difference 16: note = a, c, u, g, unknown, or other
  misc_difference 18: note = a, c, u, g, unknown, or other
  misc_difference 19: note = a, c, u, g, unknown, or other
  misc_difference 20: note = a, c, u, g, unknown, or other
  misc_difference 25: note = a, c, u, g, unknown, or other
  misc_difference 26: note = a, c, u, g, unknown, or other
  misc_difference 27: note = a, c, u, g, unknown, or other
  misc_difference 40: note = a, c, u, g, unknown, or other
  misc_difference 43: note = a, c, u, g, unknown, or other
  misc_difference 44: note = a, c, u, g, unknown, or other
  misc_difference 45: note = a, c, u, g, unknown, or other
  misc_difference 49: note = a, c, u, g, unknown, or other
  misc_difference 50: note = a, c, u, g, unknown, or other
  misc_difference 56: note = a, c, u, g, unknown, or other
  misc_difference 57: note = a, c, u, g, unknown, or other
  misc_difference 58: note = a, c, u, g, unknown, or other
  misc_difference 59: note = a, c, u, g, unknown, or other
  misc_difference 60: note = a, c, u, g, unknown, or other
  misc_difference 61: note = a, c, u, g, unknown, or other
  misc_difference 69: note = a, c, u, g, unknown, or other
  misc_difference 70: note = a, c, u, g, unknown, or other
  misc_difference 71: note = a, c, u, g, unknown, or other
  misc_difference 72: note = a, c, u, g, unknown, or other
  misc_difference 73: note = a, c, u, g, unknown, or other
  misc_difference 74: note = a, c, u, g, unknown, or other
  misc_difference 79: note = a, c, u, g, unknown, or other
  misc_difference 91: note = a, c, u, g, unknown, or other
  misc_difference 92: note = a, c, u, g, unknown, or other
  misc_difference 93: note = a, c, u, g, unknown, or other
  misc_difference 99: note = a, c, u, g, unknown, or other
  misc_difference 102: note = a, c, u, g, unknown, or other
  misc_difference 103: note = a, c, u, g, unknown, or other
  misc_difference 109: note = a, c, u, g, unknown, or other
  misc_difference 110: note = a, c, u, g, unknown, or other
  misc_difference 122: note = a, c, u, g, unknown, or other
  misc_difference 129: note = a, c, u, g, unknown, or other
  misc_difference 140: note = a, c, u, g, unknown, or other
  misc_difference 141: note = a, c, u, g, unknown, or other
  misc_difference 142: note = a, c, u, g, unknown, or other
  misc_difference 153: note = a, c, u, g, unknown, or other
  misc_difference 160: note = a, c, u, g, unknown, or other
  misc_difference 166: note = a, c, u, g, unknown, or other
  misc_difference 171: note = a, c, u, g, unknown, or other
  misc_difference 179: note = a, c, u, g, unknown, or other
  misc_difference 180: note = a, c, u, g, unknown, or other
  misc_difference 182: note = a, c, u, g, unknown, or other
  misc_difference 183: note = a, c, u, g, unknown, or other
  misc_difference 184: note = a, c, u, g, unknown, or other
  misc_difference 185: note = a, c, u, g, unknown, or other
  misc_difference 187: note = a, c, u, g, unknown, or other
  misc_difference 191: note = a, c, u, g, unknown, or other
  misc_difference 194: note = a, c, u, g, unknown, or other
  misc_difference 195: note = a, c, u, g, unknown, or other
  misc_difference 196: note = a, c, u, g, unknown, or other
  misc_difference 197: note = a, c, u, g, unknown, or other
  misc_difference 198: note = a, c, u, g, unknown, or other
  misc_difference 199: note = a, c, u, g, unknown, or other
  misc_difference 200: note = a, c, u, g, unknown, or other
  misc_difference 201: note = a, c, u, g, unknown, or other
  misc_difference 202: note = a, c, u, g, unknown, or other
  misc_difference 203: note = a, c, u, g, unknown, or other
  misc_difference 204: note = a, c, u, g, unknown, or other
  misc_difference 205: note = a, c, u, g, unknown, or other
  misc_difference 206: note = a, c, u, g, unknown, or other
  misc_difference 208: note = a, c, u, g, unknown, or other
  misc_difference 209: note = a, c, u, g, unknown, or other
  misc_difference 210: note = a, c, u, g, unknown, or other
  misc_difference 211: note = a, c, u, g, unknown, or other
  misc_difference 212: note = a, c, u, g, unknown, or other
  misc_difference 213: note = a, c, u, g, unknown, or other
  misc_difference 214: note = a, c, u, g, unknown, or other
  misc_difference 216: note = a, c, u, g, unknown, or other
  misc_difference 217: note = a, c, u, g, unknown, or other
  misc_difference 218: note = a, c, u, g, unknown, or other
  misc_difference 219: note = a, c, u, g, unknown, or other
  misc_difference 220: note = a, c, u, g, unknown, or other
  misc_difference 221: note = a, c, u, g, unknown, or other
  misc_difference 229: note = a, c, u, g, unknown, or other
  misc_difference 230: note = a, c, u, g, unknown, or other
  misc_difference 231: note = a, c, u, g, unknown, or other
  misc_difference 233: note = a, c, u, g, unknown, or other
  misc_difference 234: note = a, c, u, g, unknown, or other
  misc_difference 235: note = a, c, u, g, unknown, or other
  misc_difference 236: note = a, c, u, g, unknown, or other
  misc_difference 237: note = a, c, u, g, unknown, or other
  misc_difference 239: note = a, c, u, g, unknown, or other
  misc_difference 240: note = a, c, u, g, unknown, or other
  misc_difference 243: note = a, c, u, g, unknown, or other
  misc_difference 245: note = a, c, u, g, unknown, or other
  misc_difference 246: note = a, c, u, g, unknown, or other
  misc_difference 247: note = a, c, u, g, unknown, or other
  misc_difference 248: note = a, c, u, g, unknown, or other
  misc_difference 249: note = a, c, u, g, unknown, or other
  misc_difference 250: note = a, c, u, g, unknown, or other
  misc_difference 251: note = a, c, u, g, unknown, or other
  misc_difference 255: note = a, c, u, g, unknown, or other
  misc_difference 256: note = a, c, u, g, unknown, or other
  misc_difference 257: note = a, c, u, g, unknown, or other
  misc_difference 258: note = a, c, u, g, unknown, or other
  misc_difference 259: note = a, c, u, g, unknown, or other
  misc_difference 260: note = a, c, u, g, unknown, or other
  misc_difference 262: note = a, c, u, g, unknown, or other
  misc_difference 263: note = a, c, u, g, unknown, or other
  misc_difference 264: note = a, c, u, g, unknown, or other
  misc_difference 265: note = a, c, u, g, unknown, or other
  misc_difference 266: note = a, c, u, g, unknown, or other
  misc_difference 267: note = a, c, u, g, unknown, or other
  misc_difference 269: note = a, c, u, g, unknown, or other
  misc_difference 270: note = a, c, u, g, unknown, or other
  misc_difference 279: note = a, c, u, g, unknown, or other
  misc_difference 280: note = a, c, u, g, unknown, or other
  misc_difference 281: note = a, c, u, g, unknown, or other
  misc_difference 282: note = a, c, u, g, unknown, or other
  misc_difference 283: note = a, c, u, g, unknown, or other
nnnnnrnnnnnnnnnnrnnntccrnnnrggygacctycrnyynnncctnngrycynnnnnnragryccnnnnnnagtcnygaggcrccyynnnggayrnyynnyggrynnratryccraygnagctganyygatgccgcnnngyggacatccnaygyganagrttngryynacccyrynnrnnnnyntccngrnnnnnnnnnnnnnynnnnnnnrnnnnnnyrcryrrnnnynnnnnynnyrnynnnnnnnyyrnnnnnnrnnnnnnrnnytygygygnnnnnr

SEQ ID NO: 795522 - RNA, 255 nt, unidentified
  source 1..255: mol_type = unassigned RNA; note = 600000
  misc_difference 3: note = a, c, u, g, unknown, or other
  misc_difference 4: note = a, c, u, g, unknown, or other
  misc_difference 5: note = a, c, u, g, unknown, or other
  misc_difference 11: note = a, c, u, g, unknown, or other
  misc_difference 15: note = a, c, u, g, unknown, or other
  misc_difference 17: note = a, c, u, g, unknown, or other
  misc_difference 18: note = a, c, u, g, unknown, or other
  misc_difference 19: note = a, c, u, g, unknown, or other
  misc_difference 20: note = a, c, u, g, unknown, or other
  misc_difference 23: note = a, c, u, g, unknown, or other
  misc_difference 34: note = a, c, u, g, unknown, or other
  misc_difference 47: note = a, c, u, g, unknown, or other
  misc_difference 50: note = a, c, u, g, unknown, or other
  misc_difference 51: note = a, c, u, g, unknown, or other
  misc_difference 53: note = a, c, u, g, unknown, or other
  misc_difference 54: note = a, c, u, g, unknown, or other
  misc_difference 61: note = a, c, u, g, unknown, or other
  misc_difference 62: note = a, c, u, g, unknown, or other
  misc_difference 63: note = a, c, u, g, unknown, or other
  misc_difference 64: note = a, c, u, g, unknown, or other
  misc_difference 65: note = a, c, u, g, unknown, or other
  misc_difference 66: note = a, c, u, g, unknown, or other
  misc_difference 67: note = a, c, u, g, unknown, or other
  misc_difference 79: note = a, c, u, g, unknown, or other
  misc_difference 80: note = a, c, u, g, unknown, or other
  misc_difference 91: note = a, c, u, g, unknown, or other
  misc_difference 92: note = a, c, u, g, unknown, or other
  misc_difference 93: note = a, c, u, g, unknown, or other
  misc_difference 94: note = a, c, u, g, unknown, or other
  misc_difference 95: note = a, c, u, g, unknown, or other
  misc_difference 96: note = a, c, u, g, unknown, or other
  misc_difference 100: note = a, c, u, g, unknown, or other
  misc_difference 105: note = a, c, u, g, unknown, or other
  misc_difference 106: note = a, c, u, g, unknown, or other
  misc_difference 108: note = a, c, u, g, unknown, or other
  misc_difference 109: note = a, c, u, g, unknown, or other
  misc_difference 112: note = a, c, u, g, unknown, or other
  misc_difference 136: note = a, c, u, g, unknown, or other
  misc_difference 163: note = a, c, u, g, unknown, or other
  misc_difference 165: note = a, c, u, g, unknown, or other
  misc_difference 166: note = a, c, u, g, unknown, or other
  misc_difference 167: note = a, c, u, g, unknown, or other
  misc_difference 168: note = a, c, u, g, unknown, or other
  misc_difference 169: note = a, c, u, g, unknown, or other
  misc_difference 195: note = a, c, u, g, unknown, or other
  misc_difference 196: note = a, c, u, g, unknown, or other
  misc_difference 204: note = a, c, u, g, unknown, or other
  misc_difference 206: note = a, c, u, g, unknown, or other
  misc_difference 222: note = a, c, u, g, unknown, or other
  misc_difference 224: note = a, c, u, g, unknown, or other
  misc_difference 225: note = a, c, u, g, unknown, or other
  misc_difference 230: note = a, c, u, g, unknown, or other
  misc_difference 232: note = a, c, u, g, unknown, or other
  misc_difference 233: note = a, c, u, g, unknown, or other
  misc_difference 234: note = a, c, u, g, unknown, or other
  misc_difference 236: note = a, c, u, g, unknown, or other
  misc_difference 237: note = a, c, u, g, unknown, or other
  misc_difference 246: note = a, c, u, g, unknown, or other
  misc_difference 247: note = a, c, u, g, unknown, or other
  misc_difference 248: note = a, c, u, g, unknown, or other
  misc_difference 253: note = a, c, u, g, unknown, or other
yrnnnyggygnyyyngnnnngrnyrcygycaggnycggygyyggyrnyynnrnntgactcnnnnnnnayctggccgcynnrgygtgccytnnnnnngacntgtcnnynngrnygccggcrccggcctggcycaccngytggcytgatcagaagcytgtccgynynnnnngcgtgacycrtcacagayrtgccrynnggtgryynynyccaggccggygccgnynnygryncnnnynngrrrggrrnnnrycrnrt

SEQ ID NO: 795523 - RNA, 289 nt, unidentified
  source 1..289: mol_type = unassigned RNA; note = 53e78f
  misc_difference 1: note = a, c, u, g, unknown, or other
  misc_difference 2: note = a, c, u, g, unknown, or other
  misc_difference 3: note = a, c, u, g, unknown, or other
  misc_difference 4: note = a, c, u, g, unknown, or other
  misc_difference 5: note = a, c, u, g, unknown, or other
  misc_difference 6: note = a, c, u, g, unknown, or other
  misc_difference 7: note = a, c, u, g, unknown, or other
  misc_difference 9: note = a, c, u, g, unknown, or other
  misc_difference 12: note = a, c, u, g, unknown, or other
  misc_difference 13: note = a, c, u, g, unknown, or other
  misc_difference 14: note = a, c, u, g, unknown, or other
  misc_difference 18: note = a, c, u, g, unknown, or other
  misc_difference 21: note = a, c, u, g, unknown, or other
  misc_difference 22: note = a, c, u, g, unknown, or other
  misc_difference 23: note = a, c, u, g, unknown, or other
  misc_difference 24: note = a, c, u, g, unknown, or other
  misc_difference 25: note = a, c, u, g, unknown, or other
  misc_difference 26: note = a, c, u, g, unknown, or other
  misc_difference 27: note = a, c, u, g, unknown, or other
  misc_difference 32: note = a, c, u, g, unknown, or other
  misc_difference 35: note = a, c, u, g, unknown, or other
  misc_difference 36: note = a, c, u, g, unknown, or other
  misc_difference 37: note = a, c, u, g, unknown, or other
  misc_difference 39: note = a, c, u, g, unknown, or other
  misc_difference 43: note = a, c, u, g, unknown, or other
  misc_difference 44: note = a, c, u, g, unknown, or other
  misc_difference 45: note = a, c, u, g, unknown, or other
  misc_difference 51: note = a, c, u, g, unknown, or other
  misc_difference 52: note = a, c, u, g, unknown, or other
  misc_difference 54: note = a, c, u, g, unknown, or other
  misc_difference 59: note = a, c, u, g, unknown, or other
  misc_difference 60: note = a, c, u, g, unknown, or other
  misc_difference 61: note = a, c, u, g, unknown, or other
  misc_difference 62: note = a, c, u, g, unknown, or other
  misc_difference 63: note = a, c, u, g, unknown, or other
  misc_difference 64: note = a, c, u, g, unknown, or other
  misc_difference 65: note = a, c, u, g, unknown, or other
  misc_difference 66: note = a, c, u, g, unknown, or other
  misc_difference 67: note = a, c, u, g, unknown, or other
  misc_difference 69: note = a, c, u, g, unknown, or other
  misc_difference 72: note = a, c, u, g, unknown, or other
  misc_difference 75: note = a, c, u, g, unknown, or other
  misc_difference 76: note = a, c, u, g, unknown, or other
  misc_difference 77: note = a, c, u, g, unknown, or other
  misc_difference 78: note = a, c, u, g, unknown, or other
  misc_difference 80: note = a, c, u, g, unknown, or other
  misc_difference 81: note = a, c, u, g, unknown, or other
  misc_difference 82: note = a, c, u, g, unknown, or other
  misc_difference 83: note = a, c, u, g, unknown, or other
  misc_difference 86: note = a, c, u, g, unknown, or other
  misc_difference 87: note = a, c, u, g, unknown, or other
  misc_difference 88: note = a, c, u, g, unknown, or other
  misc_difference 89: note = a, c, u, g, unknown, or other
  misc_difference 90: note = a, c, u, g, unknown, or other
  misc_difference 91: note = a, c, u, g, unknown, or other
  misc_difference 92: note = a, c, u, g, unknown, or other
  misc_difference 94: note = a, c, u, g, unknown, or other
  misc_difference 97: note = a, c, u, g, unknown, or other
  misc_difference 98: note = a, c, u, g, unknown, or other
  misc_difference 102: note = a, c, u, g, unknown, or other
  misc_difference 103: note = a, c, u, g, unknown, or other
  misc_difference 104: note = a, c, u, g, unknown, or other
  misc_difference 109: note = a, c, u, g, unknown, or other
  misc_difference 110: note = a, c, u, g, unknown, or other
  misc_difference 111: note = a, c, u, g, unknown, or other
  misc_difference 112: note = a, c, u, g, unknown, or other
  misc_difference 113: note = a, c, u, g, unknown, or other
  misc_difference 114: note = a, c, u, g, unknown, or other
  misc_difference 115: note = a, c, u, g, unknown, or other
  misc_difference 116: note = a, c, u, g, unknown, or other
  misc_difference 117: note = a, c, u, g, unknown, or other
  misc_difference 118: note = a, c, u, g, unknown, or other
  misc_difference 128: note = a, c, u, g, unknown, or other
  misc_difference 130: note = a, c, u, g, unknown, or other
  misc_difference 133: note = a, c, u, g, unknown, or other
  misc_difference 135: note = a, c, u, g, unknown, or other
  misc_difference 137: note = a, c, u, g, unknown, or other
  misc_difference 138: note = a, c, u, g, unknown, or other
  misc_difference 140: note = a, c, u, g, unknown, or other
  misc_difference 141: note = a, c, u, g, unknown, or other
  misc_difference 142: note = a, c, u, g, unknown, or other
  misc_difference 143: note = a, c, u, g, unknown, or other
  misc_difference 144: note = a, c, u, g, unknown, or other
  misc_difference 145: note = a, c, u, g, unknown, or other
  misc_difference 146: note = a, c, u, g, unknown, or other
  misc_difference 147: note = a, c, u, g, unknown, or other
  misc_difference 148: note = a, c, u, g, unknown, or other
  misc_difference 149: note = a, c, u, g, unknown, or other
  misc_difference 150: note = a, c, u, g, unknown, or other
  misc_difference 151: note = a, c, u, g, unknown, or other
  misc_difference 152: note = a, c, u, g, unknown, or other
  misc_difference 153: note = a, c, u, g, unknown, or other
  misc_difference 154: note = a, c, u, g, unknown, or other
  misc_difference 155: note = a, c, u, g, unknown, or other
  misc_difference 156: note = a, c, u, g, unknown, or other
  misc_difference 157: note = a, c, u, g, unknown, or other
  misc_difference 158: note = a, c, u, g, unknown, or other
  misc_difference 159: note = a, c, u, g, unknown, or other
  misc_difference 164: note = a, c, u, g, unknown, or other
  misc_difference 167: note = a, c, u, g, unknown, or other
  misc_difference 170: note = a, c, u, g, unknown, or other
  misc_difference 172: note = a, c, u, g, unknown, or other
  misc_difference 175: note = a, c, u, g, unknown, or other
  misc_difference 177: note = a, c, u, g, unknown, or other
  misc_difference 178: note = a, c, u, g, unknown, or other
  misc_difference 180: note = a, c, u, g, unknown, or other
  misc_difference 182: note = a, c, u, g, unknown, or other
  misc_difference 183: note = a, c, u, g, unknown, or other
  misc_difference 184: note = a, c, u, g, unknown, or other
  misc_difference 186: note = a, c, u, g, unknown, or other
  misc_difference 187: note = a, c, u, g, unknown, or other
  misc_difference 190: note = a, c, u, g, unknown, or other
  misc_difference 192: note = a, c, u, g, unknown, or other
  misc_difference 196: note = a, c, u, g, unknown, or other
  misc_difference 197: note = a, c, u, g, unknown, or other
  misc_difference 198: note = a, c, u, g, unknown, or other
  misc_difference 199: note = a, c, u, g, unknown, or other
  misc_difference 200: note = a, c, u, g, unknown, or other
  misc_difference 201: note = a, c, u, g, unknown, or other
  misc_difference 202: note = a, c, u, g, unknown, or other
  misc_difference 204: note = a, c, u, g, unknown, or other
  misc_difference 206: note = a, c, u, g, unknown, or other
  misc_difference 207: note = a, c, u, g, unknown, or other
  misc_difference 208: note = a, c, u, g, unknown, or other
  misc_difference 209: note = a, c, u, g, unknown, or other
  misc_difference 213: note = a, c, u, g, unknown, or other
  misc_difference 214: note = a, c, u, g, unknown, or other
  misc_difference 215: note = a, c, u, g, unknown, or other
  misc_difference 216: note = a, c, u, g, unknown, or other
  misc_difference 217: note = a, c, u, g, unknown, or other
  misc_difference 218: note = a, c, u, g, unknown, or other
  misc_difference 219: note = a, c, u, g, unknown, or other
  misc_difference 220: note = a, c, u, g, unknown, or other
  misc_difference 221: note = a, c, u, g, unknown, or other
  misc_difference 225: note = a, c, u, g, unknown, or other
  misc_difference 226: note = a, c, u, g, unknown, or other
  misc_difference 228: note = a, c, u, g, unknown, or other
  misc_difference 232: note = a, c, u, g, unknown, or other
  misc_difference 233: note = a, c, u, g, unknown, or other
  misc_difference 235: note = a, c, u, g, unknown, or other
  misc_difference 236: note = a, c, u, g, unknown, or other
  misc_difference 237: note = a, c, u, g, unknown, or other
  misc_difference 238: note = a, c, u, g, unknown, or other
  misc_difference 239: note = a, c, u, g, unknown, or other
  misc_difference 240: note = a, c, u, g, unknown, or other
  misc_difference 241: note = a, c, u, g, unknown, or other
  misc_difference 242: note = a, c, u, g, unknown, or other
  misc_difference 243: note = a, c, u, g, unknown, or other
  misc_difference 244: note = a, c, u, g, unknown, or other
  misc_difference 246: note = a, c, u, g, unknown, or other
  misc_difference 248: note = a, c, u, g, unknown, or other
  misc_difference 250: note = a, c, u, g, unknown, or other
  misc_difference 251: note = a, c, u, g, unknown, or other
  misc_difference 253: note = a, c, u, g, unknown, or other
  misc_difference 254: note = a, c, u, g, unknown, or other
  misc_difference 255: note = a, c, u, g, unknown, or other
  misc_difference 256: note = a, c, u, g, unknown, or other
  misc_difference 258: note = a, c, u, g, unknown, or other
  misc_difference 259: note = a, c, u, g, unknown, or other
  misc_difference 261: note = a, c, u, g, unknown, or other
  misc_difference 262: note = a, c, u, g, unknown, or other
  misc_difference 264: note = a, c, u, g, unknown, or other
  misc_difference 265: note = a, c, u, g, unknown, or other
  misc_difference 266: note = a, c, u, g, unknown, or other
  misc_difference 267: note = a, c, u, g, unknown, or other
  misc_difference 269: note = a, c, u, g, unknown, or other
  misc_difference 270: note = a, c, u, g, unknown, or other
  misc_difference 271: note = a, c, u, g, unknown, or other
  misc_difference 272: note = a, c, u, g, unknown, or other
  misc_difference 276: note = a, c, u, g, unknown, or other
  misc_difference 277: note = a, c, u, g, unknown, or other
  misc_difference 278: note = a, c, u, g, unknown, or other
  misc_difference 279: note = a, c, u, g, unknown, or other
  misc_difference 280: note = a, c, u, g, unknown, or other
  misc_difference 281: note = a, c, u, g, unknown, or other
  misc_difference 282: note = a, c, u, g, unknown, or other
  misc_difference 284: note = a, c, u, g, unknown, or other
  misc_difference 286: note = a, c, u, g, unknown, or other
  misc_difference 287: note = a, c, u, g, unknown, or other
  misc_difference 288: note = a, c, u, g, unknown, or other
  misc_difference 289: note = a, c, u, g, unknown, or other
nnnnnnnynrrnnnyrrnyrnnnnnnnatganaannnynrarnnnyyryynnrnarcynnnnnnnnnynryngynnnnrnnnncrnnnnnnntnatnngrcnnnrryrnnnnnnnnnngarrtycatnrnrgncnrnnrnnnnnnnnnnnnnnnnnnnnayagnyynrananatnrnnrnannnrnnyynynyrynnnnnnnrntnnnnyygnnnnnnnnnyyynnynrrynnynnnnnnnnnnrnrnynnrnnnnrnnynnrnnnnrnnnnryynnnnnnnynrnnnn

SEQ ID NO: 795524 - RNA, 192 nt, unidentified
  source 1..192: mol_type = unassigned RNA; note = 047313
  misc_difference 1: note = a, c, u, g, unknown, or other
  misc_difference 2: note = a, c, u, g, unknown, or other
  misc_difference 3: note = a, c, u, g, unknown, or other
  misc_difference 4: note = a, c, u, g, unknown, or other
  misc_difference 5: note = a, c, u, g, unknown, or other
  misc_difference 6: note = a, c, u, g, unknown, or other
  misc_difference 7: note = a, c, u, g, unknown, or other
  misc_difference 8: note = a, c, u, g, unknown, or other
  misc_difference 9: note = a, c, u, g, unknown, or other
  misc_difference 10: note = a, c, u, g, unknown, or other
  misc_difference 11: note = a, c, u, g, unknown, or other
  misc_difference 15: note = a, c, u, g, unknown, or other
  misc_difference 16: note = a, c, u, g, unknown, or other
  misc_difference 17: note = a, c, u, g, unknown, or other
  misc_difference 18: note = a, c, u, g, unknown, or other
  misc_difference 19: note = a, c, u, g, unknown, or other
  misc_difference 20: note = a, c, u, g, unknown, or other
  misc_difference 21: note = a, c, u, g, unknown, or other
  misc_difference 22: note = a, c, u, g, unknown, or other
  misc_difference 23: note = a, c, u, g, unknown, or other
  misc_difference 25: note = a, c, u, g, unknown, or other
  misc_difference 26: note = a, c, u, g, unknown, or other
  misc_difference 27: note = a, c, u, g, unknown, or other
  misc_difference 28: note = a, c, u, g, unknown, or other
  misc_difference 30: note = a, c, u, g, unknown, or other
  misc_difference 31: note = a, c, u, g, unknown, or other
  misc_difference 32: note = a, c, u, g, unknown, or other
  misc_difference 33: note = a, c, u, g, unknown, or other
  misc_difference 35: note = a, c, u, g, unknown, or other
  misc_difference 36: note = a, c, u, g, unknown, or other
  misc_difference 38: note = a, c, u, g, unknown, or other
  misc_difference 39: note = a, c, u, g, unknown, or other
  misc_difference 43: note = a, c, u, g, unknown, or other
  misc_difference 45: note = a, c, u, g, unknown, or other
  misc_difference 46: note = a, c, u, g, unknown, or other
  misc_difference 49: note = a, c, u, g, unknown, or other
  misc_difference 51: note = a, c, u, g, unknown, or other
  misc_difference 53: note = a, c, u, g, unknown, or other
  misc_difference 58: note = a, c, u, g, unknown, or other
  misc_difference 59: note = a, c, u, g, unknown, or other
  misc_difference 67: note = a, c, u, g, unknown, or other
  misc_difference 68: note = a, c, u, g, unknown, or other
  misc_difference 69: note = a, c, u, g, unknown, or other
  misc_difference 70: note = a, c, u, g, unknown, or other
  misc_difference 71: note = a, c, u, g, unknown, or other
  misc_difference 72: note = a, c, u, g, unknown, or other
  misc_difference 73: note = a, c, u, g, unknown, or other
  misc_difference 77: note = a, c, u, g, unknown, or other
  misc_difference 81: note = a, c, u, g, unknown, or other
  misc_difference 84: note = a, c, u, g, unknown, or other
  misc_difference 85: note = a, c, u, g, unknown, or other
  misc_difference 86: note = a, c, u, g, unknown, or other
  misc_difference 88: note = a, c, u, g, unknown, or other
  misc_difference 94: note = a, c, u, g, unknown, or other
  misc_difference 95: note = a, c, u, g, unknown, or other
  misc_difference 96: note = a, c, u, g, unknown, or other
  misc_difference 97: note = a, c, u, g, unknown, or other
  misc_difference 98: note = a, c, u, g, unknown, or other
  misc_difference 99: note = a, c, u, g, unknown, or other
  misc_difference 110: note = a, c, u, g, unknown, or other
  misc_difference 111: note = a, c, u, g, unknown, or other
  misc_difference 116: note = a, c, u, g, unknown, or other
  misc_difference 118: note = a, c, u, g, unknown, or other
  misc_difference 120: note = a, c, u, g, unknown, or other
  misc_difference 122: note = a, c, u, g, unknown, or other
  misc_difference 123: note = a, c, u, g, unknown, or other
  misc_difference 125: note = a, c, u, g, unknown, or other
  misc_difference 132: note = a, c, u, g, unknown, or other
  misc_difference 145: note = a, c, u, g, unknown, or other
  misc_difference 152: note = a, c, u, g, unknown, or other
  misc_difference 154: note = a, c, u, g, unknown, or other
  misc_difference 156: note = a, c, u, g, unknown, or other
  misc_difference 159: note = a, c, u, g, unknown, or other
  misc_difference 160: note = a, c, u, g, unknown, or other
  misc_difference 168: note = a, c, u, g, unknown, or other
  misc_difference 173: note = a, c, u, g, unknown, or other
  misc_difference 187: note = a, c, u, g, unknown, or other
  misc_difference 188: note = a, c, u, g, unknown, or other
  misc_difference 190: note = a, c, u, g, unknown, or other
  misc_difference 191: note = a, c, u, g, unknown, or other
  misc_difference 192: note = a, c, u, g, unknown, or other
nnnnnnnnnnnrycnnnnnnnnnynnnngnnnnynnrnnryynrnnryngnrncgrgnnctgrcycnnnnnnnrtyngrcnyynnnrnygycynnnnnnygarrtgycgnncyygnynyngnnyncrggryngryctgrcytganrggagcntngnyynncycracynrgayntgycgrycgryycnnynnn

SEQ ID NO: 795525 - RNA, 311 nt, unidentified
  source 1..311: mol_type = unassigned RNA; note = 67a37b
  misc_difference 7: note = a, c, u, g, unknown, or other
  misc_difference 10: note = a, c, u, g, unknown, or other
  misc_difference 19: note = a, c, u, g, unknown, or other
  misc_difference 20: note = a, c, u, g, unknown, or other
  misc_difference 21: note = a, c, u, g, unknown, or other
  misc_difference 28: note = a, c, u, g, unknown, or other
  misc_difference 29: note = a, c, u, g, unknown, or other
  misc_difference 30: note = a, c, u, g, unknown, or other
  misc_difference 31: note = a, c, u, g, unknown, or other
  misc_difference 39: note = a, c, u, g, unknown, or other
  misc_difference 40: note = a, c, u, g, unknown, or other
  misc_difference 41: note = a, c, u, g, unknown, or other
  misc_difference 49: note = a, c, u, g, unknown, or other
  misc_difference 51: note = a, c, u, g, unknown, or other
  misc_difference 52: note = a, c, u, g, unknown, or other
  misc_difference 53: note = a, c, u, g, unknown, or other
  misc_difference 55: note = a, c, u, g, unknown, or other
  misc_difference 56: note = a, c, u, g, unknown, or other
  misc_difference 58: note = a, c, u, g, unknown, or other
  misc_difference 59: note = a, c, u, g, unknown, or other
  misc_difference 60: note = a, c, u, g, unknown, or other
  misc_difference 62: note = a, c, u, g, unknown, or other
  misc_difference 63: note = a, c, u, g, unknown, or other
  misc_difference 64: note = a, c, u, g, unknown, or other
  misc_difference 68: note = a, c, u, g, unknown, or other
  misc_difference 69: note = a, c, u, g, unknown, or other
  misc_difference 73: note = a, c, u, g, unknown, or other
  misc_difference 76: note = a, c, u, g, unknown, or other
  misc_difference 77: note = a, c, u, g, unknown, or other
  misc_difference 79: note = a, c, u, g, unknown, or other
  misc_difference 80: note = a, c, u, g, unknown, or other
  misc_difference 86: note = a, c, u, g, unknown, or other
  misc_difference 87: note = a, c, u, g, unknown, or other
  misc_difference 88: note = a, c, u, g, unknown, or other
  misc_difference 89: note = a, c, u, g, unknown, or other
  misc_difference 95: note = a, c, u, g, unknown, or other
  misc_difference 98: note = a, c, u, g, unknown, or other
  misc_difference 102: note = a, c, u, g, unknown, or other
  misc_difference 108: note = a, c, u, g, unknown, or other
  misc_difference 113: note = a, c, u, g, unknown, or other
  misc_difference 121: note = a, c, u, g, unknown, or other
  misc_difference 125: note = a, c, u, g, unknown, or other
  misc_difference 129: note = a, c, u, g, unknown, or other
  misc_difference 130: note = a, c, u, g, unknown, or other
  misc_difference 131: note = a, c, u, g, unknown, or other
  misc_difference 132: note = a, c, u, g, unknown, or other
  misc_difference 134: note = a, c, u, g, unknown, or other
  misc_difference 135: note = a, c, u, g, unknown, or other
  misc_difference 140: note = a, c, u, g, unknown, or other
  misc_difference 148: note = a, c, u, g, unknown, or other
  misc_difference 149: note = a, c, u, g, unknown, or other
  misc_difference 150: note = a, c, u, g, unknown, or other
  misc_difference 156: note = a, c, u, g, unknown, or other
  misc_difference 157: note = a, c, u, g, unknown, or other
  misc_difference 166: note = a, c, u, g, unknown, or other
  misc_difference 168: note = a, c, u, g, unknown, or other
  misc_difference 170: note = a, c, u, g, unknown, or other
  misc_difference 171: note = a, c, u, g, unknown, or other
  misc_difference 172: note = a, c, u, g, unknown, or other
  misc_difference 178: note = a, c, u, g, unknown, or other
  misc_difference 193: note = a, c, u, g, unknown, or other
  misc_difference 198: note = a, c, u, g, unknown, or other
  misc_difference 202: note = a, c, u, g, unknown, or other
  misc_difference 208: note = a, c, u, g, unknown, or other
  misc_difference 217: note = a, c, u, g, unknown, or other
  misc_difference 218: note = a, c, u, g, unknown, or other
  misc_difference 219: note = a, c, u, g, unknown, or other
  misc_difference 220: note = a, c, u, g, unknown, or other
  misc_difference 221: note = a, c, u, g, unknown, or other
  misc_difference 222: note = a, c, u, g, unknown, or other
  misc_difference 233: note = a, c, u, g, unknown, or other
  misc_difference 249: note = a, c, u, g, unknown, or other
  misc_difference 252: note = a, c, u, g, unknown, or other
  misc_difference 253: note = a, c, u, g, unknown, or other
  misc_difference 254: note = a, c, u, g, unknown, or other
  misc_difference 264: note = a, c, u, g, unknown, or other
  misc_difference 265: note = a, c, u, g, unknown, or other
  misc_difference 266: note = a, c, u, g, unknown, or other
  misc_difference 275: note = a, c, u, g, unknown, or other
  misc_difference 276: note = a, c, u, g, unknown, or other
  misc_difference 282: note = a, c, u, g, unknown, or other
  misc_difference 283: note = a, c, u, g, unknown, or other
  misc_difference 284: note = a, c, u, g, unknown, or other
  misc_difference 285: note = a, c, u, g, unknown, or other
  misc_difference 288: note = a, c, u, g, unknown, or other
  misc_difference 289: note = a, c, u, g, unknown, or other
  misc_difference 291: note = a, c, u, g, unknown, or other
  misc_difference 294: note = a, c, u, g, unknown, or other
  misc_difference 298: note = a, c, u, g, unknown, or other
  misc_difference 299: note = a, c, u, g, unknown, or other
  misc_difference 300: note = a, c, u, g, unknown, or other
  misc_difference 301: note = a, c, u, g, unknown, or other
  misc_difference 302: note = a, c, u, g, unknown, or other
  misc_difference 307: note = a, c, u, g, unknown, or other
  misc_difference 308: note = a, c, u, g, unknown, or other
  misc_difference 309: note = a, c, u, g, unknown, or other
  misc_difference 310: note = a, c, u, g, unknown, or other
gagarcnytncgayccrrnnnrrctgannnnrcragcrnnntrryryyngnnnynngnnnynnnggynngggnyrnnynnyycgynnnngctycnggnyyynrgrcrnrggtncgrgrgrnagtntcrnnnnrnnygttngcccggcnnnyrgtynngccgaggyncnynnnyracyntaggcccycycgcanraccngaanaagcrnyaggccrrnnnnnnrycgagtctcngatagaaccrtggtyngcnnnryrcgayccnnnygcttgyrnnygtcynnnnrgnnynrrnryynnnnngagrnnnny

SEQ ID NO: 795526 - RNA, 175 nt, unidentified
  source 1..175: mol_type = unassigned RNA; note = 077acd
  misc_difference 1: note = a, c, u, g, unknown, or other
  misc_difference 3: note = a, c, u, g, unknown, or other
  misc_difference 4: note = a, c, u, g, unknown, or other
  misc_difference 5: note = a, c, u, g, unknown, or other
  misc_difference 8: note = a, c, u, g, unknown, or other
  misc_difference 10: note = a, c, u, g, unknown, or other
  misc_difference 11: note = a, c, u, g, unknown, or other
  misc_difference 12: note = a, c, u, g, unknown, or other
  misc_difference 13: note = a, c, u, g, unknown, or other
  misc_difference 14: note = a, c, u, g, unknown, or other
  misc_difference 15: note = a, c, u, g, unknown, or other
  misc_difference 16: note = a, c, u, g, unknown, or other
  misc_difference 17: note = a, c, u, g, unknown, or other
  misc_difference 18: note = a, c, u, g, unknown, or other
  misc_difference 19: note = a, c, u, g, unknown, or other
  misc_difference 20: note = a, c, u, g, unknown, or other
  misc_difference 21: note = a, c, u, g, unknown, or other
  misc_difference 22: note = a, c, u, g, unknown, or other
  misc_difference 23: note = a, c, u, g, unknown, or other
  misc_difference 29: note = a, c, u, g, unknown, or other
  misc_difference 36: note = a, c, u, g, unknown, or other
  misc_difference 37: note = a, c, u, g, unknown, or other
  misc_difference 39: note = a, c, u, g, unknown, or other
  misc_difference 40: note = a, c, u, g, unknown, or other
  misc_difference 43: note = a, c, u, g, unknown, or other
  misc_difference 44: note = a, c, u, g, unknown, or other
  misc_difference 45: note = a, c, u, g, unknown, or other
  misc_difference 46: note = a, c, u, g, unknown, or other
  misc_difference 47: note = a, c, u, g, unknown, or other
  misc_difference 49: note = a, c, u, g, unknown, or other
  misc_difference 52: note = a, c, u, g, unknown, or other
  misc_difference 53: note = a, c, u, g, unknown, or other
  misc_difference 54: note = a, c, u, g, unknown, or other
  misc_difference 59: note = a, c, u, g, unknown, or other
  misc_difference 60: note = a, c, u, g, unknown, or other
  misc_difference 66: note = a, c, u, g, unknown, or other
  misc_difference 67: note = a, c, u, g, unknown, or other
  misc_difference 69: note = a, c, u, g, unknown, or other
  misc_difference 70: note = a, c, u, g, unknown, or other
  misc_difference 71: note = a, c, u, g, unknown, or other
  misc_difference 72: note = a, c, u, g, unknown, or other
  misc_difference 74: note = a, c, u, g, unknown, or other
  misc_difference 76: note = a, c, u, g, unknown, or other
  misc_difference 77: note = a, c, u, g, unknown, or other
  misc_difference 78: note = a, c, u, g, unknown, or other
  misc_difference 79: note = a, c, u, g, unknown, or other
  misc_difference 80: note = a, c, u, g, unknown, or other
  misc_difference 85: note = a, c, u, g, unknown, or other
  misc_difference 88: note = a, c, u, g, unknown, or other
  misc_difference 89: note = a, c, u, g, unknown, or other
  misc_difference 90: note = a, c, u, g, unknown, or other
  misc_difference 94: note = a, c, u, g, unknown, or other
  misc_difference 95: note = a, c, u, g, unknown, or other
  misc_difference 96: note = a, c, u, g, unknown, or other
  misc_difference 97: note = a, c, u, g, unknown, or other
  misc_difference 98: note = a, c, u, g, unknown, or other
  misc_difference 101: note = a, c, u, g, unknown, or other
  misc_difference 102: note = a, c, u, g, unknown, or other
  misc_difference 103: note = a, c, u, g, unknown, or other
  misc_difference 105: note = a, c, u, g, unknown, or other
  misc_difference 106: note = a, c, u, g, unknown, or other
  misc_difference 109: note = a, c, u, g, unknown, or other
  misc_difference 110: note = a, c, u, g, unknown, or other
  misc_difference 111: note = a, c, u, g, unknown, or other
  misc_difference 117: note = a, c, u, g, unknown, or other
  misc_difference 119: note = a, c, u, g, unknown, or other
  misc_difference 120: note = a, c, u, g, unknown, or other
  misc_difference 121: note = a, c, u, g, unknown, or other
  misc_difference 123: note = a, c, u, g, unknown, or other
  misc_difference 125: note = a, c, u, g, unknown, or other
  misc_difference 126: note = a, c, u, g, unknown, or other
  misc_difference 129: note = a, c, u, g, unknown, or other
  misc_difference 131: note = a, c, u, g, unknown, or other
  misc_difference 132: note = a, c, u, g, unknown, or other
  misc_difference 133: note = a, c, u, g, unknown, or other
  misc_difference 134: note = a, c, u, g, unknown, or other
  misc_difference 135: note = a, c, u, g, unknown, or other
  misc_difference 137: note = a, c, u, g, unknown, or other
  misc_difference 138: note = a, c, u, g, unknown, or other
  misc_difference 139: note = a, c, u, g, unknown, or other
  misc_difference 140: note = a, c, u, g, unknown, or other
  misc_difference 141: note = a, c, u, g, unknown, or other
  misc_difference 145: note = a, c, u, g, unknown, or other
  misc_difference 151: note = a, c, u, g, unknown, or other
  misc_difference 153: note = a, c, u, g, unknown, or other
  misc_difference 154: note = a, c, u, g, unknown, or other
  misc_difference 155: note = a, c, u, g, unknown, or other
  misc_difference 157: note = a, c, u, g, unknown, or other
  misc_difference 158: note = a, c, u, g, unknown, or other
  misc_difference 161: note = a, c, u, g, unknown, or other
  misc_difference 162: note = a, c, u, g, unknown, or other
  misc_difference 163: note = a, c, u, g, unknown, or other
  misc_difference 164: note = a, c, u, g, unknown, or other
  misc_difference 166: note = a, c, u, g, unknown, or other
  misc_difference 170: note = a, c, u, g, unknown, or other
  misc_difference 172: note = a, c, u, g, unknown, or other
  misc_difference 173: note = a, c, u, g, unknown, or other
  misc_difference 174: note = a, c, u, g, unknown, or other
  misc_difference 175: note = a, c, u, g, unknown, or other
nrnnnyrnynnnnnnnnnnnnnnyrrrrnrrrrrrnnrnnrynnnnnynyynnnrgyynnrrrcynnynnnnrngnnnnnyyyynyynnnyyrnnnnnyynnnrnnycnnnrryrgnynnngnynnrancnnnnntnnnnnryrngryrrngnnnrnnrrnnnnynyyrnynnnn

SEQ ID NO: 795527 - RNA, 219 nt, unidentified
  source 1..219: mol_type = unassigned RNA; note = 36000
  misc_difference 2: note = a, c, u, g, unknown, or other
  misc_difference 3: note = a, c, u, g, unknown, or other
  misc_difference 8: note = a, c, u, g, unknown, or other
  misc_difference 9: note = a, c, u, g, unknown, or other
  misc_difference 10: note = a, c, u, g, unknown, or other
  misc_difference 11: note = a, c, u, g, unknown, or other
  misc_difference 12: note = a, c, u, g, unknown, or other
  misc_difference 13: note = a, c, u, g, unknown, or other
  misc_difference 15: note = a, c, u, g, unknown, or other
  misc_difference 16: note = a, c, u, g, unknown, or other
  misc_difference 17: note = a, c, u, g, unknown, or other
  misc_difference 18: note = a, c, u, g, unknown, or other
  misc_difference 19: note = a, c, u, g, unknown, or other
  misc_difference 22: note = a, c, u, g, unknown, or other
  misc_difference 23: note = a, c, u, g, unknown, or other
  misc_difference 24: note = a, c, u, g, unknown, or other
  misc_difference 25: note = a, c, u, g, unknown, or other
  misc_difference 26: note = a, c, u, g, unknown, or other
  misc_difference 27: note = a, c, u, g, unknown, or other
  misc_difference 28: note = a, c, u, g, unknown, or other
  misc_difference 29: note = a, c, u, g, unknown, or other
  misc_difference 30: note = a, c, u, g, unknown, or other
  misc_difference 32: note = a, c, u, g, unknown, or other
  misc_difference 33: note = a, c, u, g, unknown, or other
  misc_difference 35: note = a, c, u, g, unknown, or other
  misc_difference 36: note = a, c, u, g, unknown, or other
  misc_difference 37: note = a, c, u, g, unknown, or other
  misc_difference 39: note = a, c, u, g, unknown, or other
  misc_difference 40: note = a, c, u, g, unknown, or other
  misc_difference 42: note = a, c, u, g, unknown, or other
  misc_difference 43: note = a, c, u, g, unknown, or other
  misc_difference 44: note = a, c, u, g, unknown, or other
  misc_difference 45: note = a, c, u, g, unknown, or other
  misc_difference 46: note = a, c, u, g, unknown, or other
  misc_difference 47: note = a, c, u, g, unknown, or other
  misc_difference 48: note = a, c, u, g, unknown, or other
  misc_difference 49: note = a, c, u, g, unknown, or other
  misc_difference 50: note = a, c, u, g, unknown, or other
  misc_difference 51: note = a, c, u, g, unknown, or other
  misc_difference 52: note = a, c, u, g, unknown, or other
  misc_difference 53: note = a, c, u, g, unknown, or other
  misc_difference 54: note = a, c, u, g, unknown, or other
  misc_difference 56: note = a, c, u, g, unknown, or other
  misc_difference 57: note = a, c, u, g, unknown, or other
  misc_difference 59: note = a, c, u, g, unknown, or other
  misc_difference 62: note = a, c, u, g, unknown, or other
  misc_difference 63: note = a, c, u, g, unknown, or other
  misc_difference 65: note = a, c, u, g, unknown, or other
  misc_difference 72: note = a, c, u, g, unknown, or other
  misc_difference 83: note = a, c, u, g, unknown, or other
  misc_difference 84: note = a, c, u, g, unknown, or other
  misc_difference 85: note = a, c, u, g, unknown, or other
  misc_difference 86: note = a, c, u, g, unknown, or other
  misc_difference 87: note = a, c, u, g, unknown, or other
  misc_difference 88: note = a, c, u, g, unknown, or other
  misc_difference 89: note = a, c, u, g, unknown, or other
  misc_difference 90: note = a, c, u, g, unknown, or other
  misc_difference 91: note = a, c, u, g, unknown, or other
  misc_difference 92: note = a, c, u, g, unknown, or other
  misc_difference 97: note = a, c, u, g, unknown, or other
  misc_difference 99: note = a, c, u, g, unknown, or other
  misc_difference 100: note = a, c, u, g, unknown, or other
  misc_difference 101: note = a, c, u, g, unknown, or other
  misc_difference 102: note = a, c, u, g, unknown, or other
  misc_difference 105: note = a, c, u, g, unknown, or other
  misc_difference 106: note = a, c, u, g, unknown, or other
  misc_difference 109: note = a, c, u, g, unknown, or other
  misc_difference 110: note = a, c, u, g, unknown, or other
  misc_difference 111: note = a, c, u, g, unknown, or other
  misc_difference 112: note = a, c, u, g, unknown, or other
  misc_difference 113: note = a, c, u, g, unknown, or other
  misc_difference 114: note = a, c, u, g, unknown, or other
  misc_difference 115: note = a, c, u, g, unknown, or other
  misc_difference 117: note = a, c, u, g, unknown, or other
  misc_difference 128: note = a, c, u, g, unknown, or other
  misc_difference 135: note = a, c, u, g, unknown, or other
  misc_difference 137: note = a, c, u, g, unknown, or other
  misc_difference 138: note = a, c, u, g, unknown, or other
  misc_difference 143: note = a, c, u, g, unknown, or other
  misc_difference 144: note = a, c, u, g, unknown, or other
  misc_difference 145: note = a, c, u, g, unknown, or other
  misc_difference 147: note = a, c, u, g, unknown, or other
  misc_difference 148: note = a, c, u, g, unknown, or other
  misc_difference 149: note = a, c, u, g, unknown, or other
  misc_difference 153: note = a, c, u, g, unknown, or other
  misc_difference 161: note = a, c, u, g, unknown, or other
  misc_difference 162: note = a, c, u, g, unknown, or other
  misc_difference 164: note = a, c, u, g, unknown, or other
  misc_difference 166: note = a, c, u, g, unknown, or other
  misc_difference 168: note = a, c, u, g, unknown, or other
  misc_difference 170: note = a, c, u, g, unknown, or other
  misc_difference 171: note = a, c, u, g, unknown, or other
  misc_difference 172: note = a, c, u, g, unknown, or other
  misc_difference 179: note = a, c, u, g, unknown, or other
  misc_difference 186: note = a, c, u, g, unknown, or other
  misc_difference 187: note = a, c, u, g, unknown, or other
  misc_difference 188: note = a, c, u, g, unknown, or other
  misc_difference 192: note = a, c, u, g, unknown, or other
  misc_difference 193: note = a, c, u, g, unknown, or other
  misc_difference 194: note = a, c, u, g, unknown, or other
  misc_difference 195: note = a, c, u, g, unknown, or other
  misc_difference 197: note = a, c, u, g, unknown, or other
  misc_difference 198: note = a, c, u, g, unknown, or other
  misc_difference 203: note = a, c, u, g, unknown, or other
  misc_difference 205: note = a, c, u, g, unknown, or other
  misc_difference 206: note = a, c, u, g, unknown, or other
  misc_difference 208: note = a, c, u, g, unknown, or other
  misc_difference 209: note = a, c, u, g, unknown, or other
  misc_difference 212: note = a, c, u, g, unknown, or other
  misc_difference 216: note = a, c, u, g, unknown, or other
  misc_difference 217: note = a, c, u, g, unknown, or other
  misc_difference 218: note = a, c, u, g, unknown, or other
rnntyyrnnnnnnrnnnnnyynnnnnnnnnrnnrnnnrnnynnnnnnnnnnnnnannynrrnnrnrrrrrrnrrrgtgaactnnnnnnnnnnytagnynnnnagnncynnnnnnngnryyagtcyyynyyyyyynynnrttgnnnrnnncyanytagaatnntnrnynynnnrryyyrnyaaargnnntrgnnnnrnncaaynynnynnytnryynnna

SEQ ID NO: 795528 - RNA, 273 nt, unidentified
  source 1..273: mol_type = unassigned RNA; note = ba1eff
  misc_difference 1: note = a, c, u, g, unknown, or other
  misc_difference 2: note = a, c, u, g, unknown, or other
  misc_difference 3: note = a, c, u, g, unknown, or other
  misc_difference 5: note = a, c, u, g, unknown, or other
  misc_difference 6: note = a, c, u, g, unknown, or other
  misc_difference 7: note = a, c, u, g, unknown, or other
  misc_difference 12: note = a, c, u, g, unknown, or other
  misc_difference 13: note = a, c, u, g, unknown, or other
  misc_difference 14: note = a, c, u, g, unknown, or other
  misc_difference 15: note = a, c, u, g, unknown, or other
  misc_difference 16: note = a, c, u, g, unknown, or other
  misc_difference 21: note = a, c, u, g, unknown, or other
  misc_difference 22: note = a, c, u, g, unknown, or other
  misc_difference 23: note = a, c, u, g, unknown, or other
  misc_difference 36: note = a, c, u, g, unknown, or other
  misc_difference 37: note = a, c, u, g, unknown, or other
  misc_difference 39: note = a, c, u, g, unknown, or other
  misc_difference 40: note = a, c, u, g, unknown, or other
  misc_difference 41: note = a, c, u, g, unknown, or other
  misc_difference 45: note = a, c, u, g, unknown, or other
  misc_difference 46: note = a, c, u, g, unknown, or other
  misc_difference 52: note = a, c, u, g, unknown, or other
  misc_difference 53: note = a, c, u, g, unknown, or other
  misc_difference 54: note = a, c, u, g, unknown, or other
  misc_difference 55: note = a, c, u, g, unknown, or other
  misc_difference 56: note = a, c, u, g, unknown, or other
  misc_difference 57: note = a, c, u, g, unknown, or other
  misc_difference 65: note = a, c, u, g, unknown, or other
  misc_difference 66: note = a, c, u, g, unknown, or other
  misc_difference 67: note = a, c, u, g, unknown, or other
  misc_difference 68: note = a, c, u, g, unknown, or other
  misc_difference 69: note = a, c, u, g, unknown, or other
  misc_difference 70: note = a, c, u, g, unknown, or other
  misc_difference 75: note = a, c, u, g, unknown, or other
  misc_difference 88: note = a, c, u, g, unknown, or other
  misc_difference 93: note = a, c, u, g, unknown, or other
  misc_difference 94: note = a, c, u, g, unknown, or other
  misc_difference 97: note = a, c, u, g, unknown, or other
  misc_difference 98: note = a, c, u, g, unknown, or other
  misc_difference 100: note = a, c, u, g, unknown, or other
  misc_difference 104: note = a, c, u, g, unknown, or other
  misc_difference 105: note = a, c, u, g, unknown, or other
  misc_difference 117: note = a, c, u, g, unknown, or other
  misc_difference 124: note = a, c, u, g, unknown, or other
  misc_difference 136: note = a, c, u, g, unknown, or other
  misc_difference 137: note = a, c, u, g, unknown, or other
  misc_difference 148: note = a, c, u, g, unknown, or other
  misc_difference 155: note = a, c, u, g, unknown, or other
  misc_difference 161: note = a, c, u, g, unknown, or other
  misc_difference 166: note = a, c, u, g, unknown, or other
  misc_difference 171: note = a, c, u, g, unknown, or other
  misc_difference 172: note = a, c, u, g, unknown, or other
  misc_difference 174: note = a, c, u, g, unknown, or other
  misc_difference 175: note = a, c, u, g, unknown, or other
  misc_difference 177: note = a, c, u, g, unknown, or other
  misc_difference 178: note = a, c, u, g, unknown, or other
  misc_difference 179: note = a, c, u, g, unknown, or other
  misc_difference 180: note = a, c, u, g, unknown, or other
  misc_difference 189: note = a, c, u, g, unknown, or other
  misc_difference 190: note = a, c, u, g, unknown, or other
  misc_difference 191: note = a, c, u, g, unknown, or other
  misc_difference 192: note = a, c, u, g, unknown, or other
  misc_difference 193: note = a, c, u, g, unknown, or other
  misc_difference 194: note = a, c, u, g, unknown, or other
  misc_difference 195: note = a, c, u, g, unknown, or other
  misc_difference 196: note = a, c, u, g, unknown, or other
  misc_difference 197: note = a, c, u, g, unknown, or other
  misc_difference 198: note = a, c, u, g, unknown, or other
  misc_difference 199: note = a, c, u, g, unknown, or other
  misc_difference 200: note = a, c, u, g, unknown, or other
  misc_difference 204: note = a, c, u, g, unknown, or other
  misc_difference 205: note = a, c, u, g, unknown, or other
  misc_difference 206: note = a, c, u, g, unknown, or other
  misc_difference 207: note = a, c, u, g, unknown, or other
  misc_difference 208: note = a, c, u, g, unknown, or other
  misc_difference 209: note = a, c, u, g, unknown, or other
  misc_difference 210: note = a, c, u, g, unknown, or other
  misc_difference 211: note = a, c, u, g, unknown, or other
  misc_difference 212: note = a, c, u, g, unknown, or other
  misc_difference 213: note = a, c, u, g, unknown, or other
  misc_difference 214: note = a, c, u, g, unknown, or other
  misc_difference 215: note = a, c, u, g, unknown, or other
  misc_difference 216: note = a, c, u, g, unknown, or other
  misc_difference 221: note = a, c, u, g, unknown, or other
  misc_difference 223: note = a, c, u, g, unknown, or other
  misc_difference 224: note = a, c, u, g, unknown, or other
  misc_difference 227: note = a, c, u, g, unknown, or other
  misc_difference 228: note = a, c, u, g, unknown, or other
  misc_difference 229: note = a, c, u, g, unknown, or other
  misc_difference 230: note = a, c, u, g, unknown, or other
  misc_difference 231: note = a, c, u, g, unknown, or other
  misc_difference 233: note = a, c, u, g, unknown, or other
  misc_difference 234: note = a, c, u, g, unknown, or other
  misc_difference 235: note = a, c, u, g, unknown, or other
  misc_difference 236: note = a, c, u, g, unknown, or other
  misc_difference 237: note = a, c, u, g, unknown, or other
  misc_difference 238: note = a, c, u, g, unknown, or other
  misc_difference 239: note = a, c, u, g, unknown, or other
  misc_difference 240: note = a, c, u, g, unknown, or other
  misc_difference 241: note = a, c, u, g, unknown, or other
  misc_difference 242: note = a, c, u, g, unknown, or other
  misc_difference 243: note = a, c, u, g, unknown, or other
  misc_difference 244: note = a, c, u, g, unknown, or other
  misc_difference 245: note = a, c, u, g, unknown, or other
  misc_difference 246: note = a, c, u, g, unknown, or other
  misc_difference 247: note = a, c, u, g, unknown, or other
  misc_difference 248: note = a, c, u, g, unknown, or other
  misc_difference 249: note = a, c, u, g, unknown, or other
  misc_difference 250: note = a, c, u, g, unknown, or other
  misc_difference 252: note = a, c, u, g, unknown, or other
  misc_difference 253: note = a, c, u, g, unknown, or other
  misc_difference 254: note = a, c, u, g, unknown, or other
  misc_difference 255: note = a, c, u, g, unknown, or other
  misc_difference 256: note = a, c, u, g, unknown, or other
  misc_difference 259: note = a, c, u, g, unknown, or other
  misc_difference 268: note = a, c, u, g, unknown, or other
  misc_difference 269: note = a, c, u, g, unknown, or other
  misc_difference 270: note = a, c, u, g, unknown, or other
  misc_difference 271: note = a, c, u, g, unknown, or other
  misc_difference 272: note = a, c, u, g, unknown, or other
  misc_difference 273: note = a, c, u, g, unknown, or other
nnnrnnnryyrnnnnnyycrnnnrggygacctycrnnynnnycynngrycynnnnnngagryycnnnnnnagtcnyraggcrccyyrnggrynnyynnyngrynnratryycraygnagctganyygrygccgyynnryggacryccnayryganaggyyngryynacccnnynnrnnnnyyycyggrnnnnnnnnnnnnyyrnnnnnnnnnnnnnyryrnrnnyynnnnnynnnnnnnnnnnnnnnnnnrnnnnnrrnyyygygygnnnnnn

SEQ ID NO: 795529 - RNA, 219 nt, unidentified
  source 1..219: mol_type = unassigned RNA; note = 2fb6c6
  misc_difference 3: note = a, c, u, g, unknown, or other
  misc_difference 5: note = a, c, u, g, unknown, or other
  misc_difference 7: note = a, c, u, g, unknown, or other
  misc_difference 8: note = a, c, u, g, unknown, or other
  misc_difference 13: note = a, c, u, g, unknown, or other
  misc_difference 16: note = a, c, u, g, unknown, or other
  misc_difference 19: note = a, c, u, g, unknown, or other
  misc_difference 20: note = a, c, u, g, unknown, or other
  misc_difference 21: note = a, c, u, g, unknown, or other
  misc_difference 22: note = a, c, u, g, unknown, or other
  misc_difference 23: note = a, c, u, g, unknown, or other
  misc_difference 25: note = a, c, u, g, unknown, or other
  misc_difference 26: note = a, c, u, g, unknown, or other
  misc_difference 33: note = a, c, u, g, unknown, or other
  misc_difference 34: note = a, c, u, g, unknown, or other
  misc_difference 35: note = a, c, u, g, unknown, or other
  misc_difference 36: note = a, c, u, g, unknown, or other
  misc_difference 37: note = a, c, u, g, unknown, or other
  misc_difference 38: note = a, c, u, g, unknown, or other
  misc_difference 39: note = a, c, u, g, unknown, or other
  misc_difference 47: note = a, c, u, g, unknown, or other
  misc_difference 48: note = a, c, u, g, unknown, or other
  misc_difference 49: note = a, c, u, g, unknown, or other
  misc_difference 50: note = a, c, u, g, unknown, or other
  misc_difference 52: note = a, c, u, g, unknown, or other
  misc_difference 53: note = a, c, u, g, unknown, or other
  misc_difference 56: note = a, c, u, g, unknown, or other
  misc_difference 58: note = a, c, u, g, unknown, or other
  misc_difference 67: note = a, c, u, g, unknown, or other
  misc_difference 68: note = a, c, u, g, unknown, or other
  misc_difference 69: note = a, c, u, g, unknown, or other
  misc_difference 70: note = a, c, u, g, unknown, or other
  misc_difference 71: note = a, c, u, g, unknown, or other
  misc_difference 72: note = a, c, u, g, unknown, or other
  misc_difference 73: note = a, c, u, g, unknown, or other
  misc_difference 74: note = a, c, u, g, unknown, or other
  misc_difference 77: note = a, c, u, g, unknown, or other
  misc_difference 78: note = a, c, u, g, unknown, or other
  misc_difference 80: note = a, c, u, g, unknown, or other
  misc_difference 81: note = a, c, u, g, unknown, or other
  misc_difference 83: note = a, c, u, g, unknown, or other
  misc_difference 84: note = a, c, u, g, unknown, or other
  misc_difference 85: note = a, c, u, g, unknown, or other
  misc_difference 89: note = a, c, u, g, unknown, or other
  misc_difference 90: note = a, c, u, g, unknown, or other
  misc_difference 93: note = a, c, u, g, unknown, or other
  misc_difference 94: note = a, c, u, g, unknown, or other
  misc_difference 95: note = a, c, u, g, unknown, or other
  misc_difference 96: note = a, c, u, g, unknown, or other
  misc_difference 97: note = a, c, u, g, unknown, or other
  misc_difference 98: note = a, c, u, g, unknown, or other
  misc_difference 103: note = a, c, u, g, unknown, or other
  misc_difference 106: note = a, c, u, g, unknown, or other
  misc_difference 108: note = a, c, u, g, unknown, or other
  misc_difference 110: note = a, c, u, g, unknown, or other
  misc_difference 113: note = a, c, u, g, unknown, or other
  misc_difference 114: note = a, c, u, g, unknown, or other
  misc_difference 115: note = a, c, u, g, unknown, or other
  misc_difference 127: note = a, c, u, g, unknown, or other
  misc_difference 134: note = a, c, u, g, unknown, or other
  misc_difference 136: note = a, c, u, g, unknown, or other
  misc_difference 140: note = a, c, u, g, unknown, or other
  misc_difference 142: note = a, c, u, g, unknown, or other
  misc_difference 143: note = a, c, u, g, unknown, or other
  misc_difference 144: note = a, c, u, g, unknown, or other
  misc_difference 145: note = a, c, u, g, unknown, or other
  misc_difference 146: note = a, c, u, g, unknown, or other
  misc_difference 147: note = a, c, u, g, unknown, or other
  misc_difference 150: note = a, c, u, g, unknown, or other
  misc_difference 153: note = a, c, u, g, unknown, or other
  misc_difference 154: note = a, c, u, g, unknown, or other
  misc_difference 155: note = a, c, u, g, unknown, or other
  misc_difference 157: note = a, c, u, g, unknown, or other
  misc_difference 170: note = a, c, u, g, unknown, or other
  misc_difference 173: note = a, c, u, g, unknown, or other
  misc_difference 178: note = a, c, u, g, unknown, or other
  misc_difference 181: note = a, c, u, g, unknown, or other
  misc_difference 183: note = a, c, u, g, unknown, or other
  misc_difference 185: note = a, c, u, g, unknown, or other
  misc_difference 186: note = a, c, u, g, unknown, or other
  misc_difference 187: note = a, c, u, g, unknown, or other
  misc_difference 191: note = a, c, u, g, unknown, or other
  misc_difference 192: note = a, c, u, g, unknown, or other
  misc_difference 193: note = a, c, u, g, unknown, or other
  misc_difference 194: note = a, c, u, g, unknown, or other
  misc_difference 195: note = a, c, u, g, unknown, or other
  misc_difference 198: note = a, c, u, g, unknown, or other
  misc_difference 199: note = a, c, u, g, unknown, or other
  misc_difference 201: note = a, c, u, g, unknown, or other
  misc_difference 202: note = a, c, u, g, unknown, or other
  misc_difference 203: note = a, c, u, g, unknown, or other
  misc_difference 204: note = a, c, u, g, unknown, or other
  misc_difference 206: note = a, c, u, g, unknown, or other
  misc_difference 212: note = a, c, u, g, unknown, or other
  misc_difference 213: note = a, c, u, g, unknown, or other
  misc_difference 214: note = a, c, u, g, unknown, or other
  misc_difference 215: note = a, c, u, g, unknown, or other
  misc_difference 216: note = a, c, u, g, unknown, or other
  misc_difference 217: note = a, c, u, g, unknown, or other
yrnrnrnnyryrnrrnyrnnnnnrnnryraygnnnnnnngrtyrrrnnnnrnnyynrnrrarycygnnnnnnnnyrnngnnynnnrarnncgnnnnnnygrtnrgnrnynrrnnngcgrayyycatnrrggcyngnrgynrnnnnnnyyncrnnnanargccgrayayanrrnygcanyynanynnnyrynnnnnyrnnynnnnynyttgcnnnnnnrg

SEQ ID NO: 795530 - RNA, 273 nt, unidentified
  source 1..273: mol_type = unassigned RNA; note = b32f92
  misc_difference 1: note = a, c, u, g, unknown, or other
  misc_difference 3: note = a, c, u, g, unknown, or other
  misc_difference 4: note = a, c, u, g, unknown, or other
  misc_difference 5: note = a, c, u, g, unknown, or other
  misc_difference 6: note = a, c, u, g, unknown, or other
  misc_difference 8: note = a, c, u, g, unknown, or other
  misc_difference 9: note = a, c, u, g, unknown, or other
  misc_difference 11: note = a, c, u, g, unknown, or other
  misc_difference 12: note = a, c, u, g, unknown, or other
  misc_difference 13: note = a, c, u, g, unknown, or other
  misc_difference 14: note = a, c, u, g, unknown, or other
  misc_difference 15: note = a, c, u, g, unknown, or other
  misc_difference 16: note = a, c, u, g, unknown, or other
  misc_difference 17: note = a, c, u, g, unknown, or other
  misc_difference 18: note = a, c, u, g, unknown, or other
  misc_difference 23: note = a, c, u, g, unknown, or other
  misc_difference 25: note = a, c, u, g, unknown, or other
  misc_difference 38: note = a, c, u, g, unknown, or other
  misc_difference 39: note = a, c, u, g, unknown, or other
  misc_difference 40: note = a, c, u, g, unknown, or other
  misc_difference 41: note = a, c, u, g, unknown, or other
  misc_difference 42: note = a, c, u, g, unknown, or other
  misc_difference 43: note = a, c, u, g, unknown, or other
  misc_difference 47: note = a, c, u, g, unknown, or other
  misc_difference 48: note = a, c, u, g, unknown, or other
  misc_difference 54: note = a, c, u, g, unknown, or other
  misc_difference 55: note = a, c, u, g, unknown, or other
  misc_difference 56: note = a, c, u, g, unknown, or other
  misc_difference 57: note = a, c, u, g, unknown, or other
  misc_difference 58: note = a, c, u, g, unknown, or other
  misc_difference 66: note = a, c, u, g, unknown, or other
  misc_difference 67: note = a, c, u, g, unknown, or other
  misc_difference 68: note = a, c, u, g, unknown, or other
  misc_difference 69: note = a, c, u, g, unknown, or other
  misc_difference 70: note = a, c, u, g, unknown, or other
  misc_difference 71: note = a, c, u, g, unknown, or other
  misc_difference 76: note = a, c, u, g, unknown, or other
  misc_difference 87: note = a, c, u, g, unknown, or other
  misc_difference 88: note = a, c, u, g, unknown, or other
  misc_difference 90: note = a, c, u, g, unknown, or other
  misc_difference 96: note = a, c, u, g, unknown, or other
  misc_difference 99: note = a, c, u, g, unknown, or other
  misc_difference 101: note = a, c, u, g, unknown, or other
  misc_difference 106: note = a, c, u, g, unknown, or other
  misc_difference 107: note = a, c, u, g, unknown, or other
  misc_difference 119: note = a, c, u, g, unknown, or other
  misc_difference 126: note = a, c, u, g, unknown, or other
  misc_difference 137: note = a, c, u, g, unknown, or other
  misc_difference 138: note = a, c, u, g, unknown, or other
  misc_difference 139: note = a, c, u, g, unknown, or other
  misc_difference 140: note = a, c, u, g, unknown, or other
  misc_difference 151: note = a, c, u, g, unknown, or other
  misc_difference 158: note = a, c, u, g, unknown, or other
  misc_difference 164: note = a, c, u, g, unknown, or other
  misc_difference 168: note = a, c, u, g, unknown, or other
  misc_difference 169: note = a, c, u, g, unknown, or other
  misc_difference 174: note = a, c, u, g, unknown, or other
  misc_difference 175: note = a, c, u, g, unknown, or other
  misc_difference 177: note = a, c, u, g, unknown, or other
  misc_difference 178: note = a, c, u, g, unknown, or other
  misc_difference 181: note = a, c, u, g, unknown, or other
  misc_difference 182: note = a, c, u, g, unknown, or other
  misc_difference 184: note = a, c, u, g, unknown, or other
  misc_difference 188: note = a, c, u, g, unknown, or other
  misc_difference 191: note = a, c, u, g, unknown, or other
  misc_difference 192: note = a, c, u, g, unknown, or other
  misc_difference 193: note = a, c, u, g, unknown, or other
  misc_difference 194: note = a, c, u, g, unknown, or other
  misc_difference 195: note = a, c, u, g, unknown, or other
  misc_difference 197: note = a, c, u, g, unknown, or other
  misc_difference 198: note = a, c, u, g, unknown, or other
  misc_difference 199: note = a, c, u, g, unknown, or other
  misc_difference 200: note = a, c, u, g, unknown, or other
  misc_difference 202: note = a, c, u, g, unknown, or other
  misc_difference 204: note = a, c, u, g, unknown, or other
  misc_difference 205: note = a, c, u, g, unknown, or other
  misc_difference 206: note = a, c, u, g, unknown, or other
  misc_difference 207: note = a, c, u, g, unknown, or other
  misc_difference 208: note = a, c, u, g, unknown, or other
  misc_difference 209: note = a, c, u, g, unknown, or other
  misc_difference 210: note = a, c, u, g, unknown, or other
  misc_difference 211: note = a, c, u, g, unknown, or other
  misc_difference 212: note = a, c, u, g, unknown, or other
  misc_difference 213: note = a, c, u, g, unknown, or other
  misc_difference 214: note = a, c, u, g, unknown, or other
  misc_difference 215: note = a, c, u, g, unknown, or other
  misc_difference 216: note = a, c, u, g, unknown, or other
  misc_difference 217: note = a, c, u, g, unknown, or other
  misc_difference 218: note = a, c, u, g, unknown, or other
  misc_difference 219: note = a, c, u, g, unknown, or other
  misc_difference 225: note = a, c, u, g, unknown, or other
  misc_difference 227: note = a, c, u, g, unknown, or other
  misc_difference 228: note = a, c, u, g, unknown, or other
  misc_difference 230: note = a, c, u, g, unknown, or other
  misc_difference 231: note = a, c, u, g, unknown, or other
  misc_difference 233: note = a, c, u, g, unknown, or other
  misc_difference 234: note = a, c, u, g, unknown, or other
  misc_difference 235: note = a, c, u, g, unknown, or other
  misc_difference 236: note = a, c, u, g, unknown, or other
  misc_difference 237: note = a, c, u, g, unknown, or other
  misc_difference 240: note = a, c, u, g, unknown, or other
  misc_difference 241: note = a, c, u, g, unknown, or other
  misc_difference 242: note = a, c, u, g, unknown, or other
  misc_difference 243: note = a, c, u, g, unknown, or other
  misc_difference 244: note = a, c, u, g, unknown, or other
  misc_difference 245: note = a, c, u, g, unknown, or other
  misc_difference 246: note = a, c, u, g, unknown, or other
  misc_difference 247: note = a, c, u, g, unknown, or other
  misc_difference 248: note = a, c, u, g, unknown, or other
  misc_difference 250: note = a, c, u, g, unknown, or other
  misc_difference 251: note = a, c, u, g, unknown, or other
  misc_difference 253: note = a, c, u, g, unknown, or other
  misc_difference 254: note = a, c, u, g, unknown, or other
  misc_difference 255: note = a, c, u, g, unknown, or other
  misc_difference 258: note = a, c, u, g, unknown, or other
  misc_difference 259: note = a, c, u, g, unknown, or other
  misc_difference 268: note = a, c, u, g, unknown, or other
  misc_difference 269: note = a, c, u, g, unknown, or other
  misc_difference 270: note = a, c, u, g, unknown, or other
  misc_difference 271: note = a, c, u, g, unknown, or other
  misc_difference 272: note = a, c, u, g, unknown, or other
  misc_difference 273: note = a, c, u, g, unknown, or other
nynnnnrnnrnnnnnnnntccgnynrggygacytycrnnnnnnccynngryyynnnnngarryycnnnnnnagtcnyraggcrcyynnrngrryrnyynrnggrynnratryycraygnagctganyygrygccgynnnngyggacryccnayryganagrtyngrynnacccnnynnrynnynyccnrrnnnnnynnnnynrnnnnnnnnnnnnnnnnryrcrnrnnynnynnnnnyrnnnnnnnnnrnnrnnnrrnnyyygygyrnnnnnn

SEQ ID NO: 795531 - RNA, 217 nt, unidentified
  source 1..217: mol_type = unassigned RNA; note = 10cb62
  misc_difference 3: note = a, c, u, g, unknown, or other
  misc_difference 4: note = a, c, u, g, unknown, or other
  misc_difference 5: note = a, c, u, g, unknown, or other
  misc_difference 6: note = a, c, u, g, unknown, or other
  misc_difference 7: note = a, c, u, g, unknown, or other
  misc_difference 9: note = a, c, u, g, unknown, or other
  misc_difference 11: note = a, c, u, g, unknown, or other
  misc_difference 13: note = a, c, u, g, unknown, or other
  misc_difference 14: note = a, c, u, g, unknown, or other
  misc_difference 15: note = a, c, u, g, unknown, or other
  misc_difference 18: note = a, c, u, g, unknown, or other
  misc_difference 19: note = a, c, u, g, unknown, or other
  misc_difference 20: note = a, c, u, g, unknown, or other
  misc_difference 21: note = a, c, u, g, unknown, or other
  misc_difference 22: note = a, c, u, g, unknown, or other
  misc_difference 23: note = a, c, u, g, unknown, or other
  misc_difference 24: note = a, c, u, g, unknown, or other
  misc_difference 25: note = a, c, u, g, unknown, or other
  misc_difference 26: note = a, c, u, g, unknown, or other
  misc_difference 27: note = a, c, u, g, unknown, or other
  misc_difference 28: note = a, c, u, g, unknown, or other
  misc_difference 29: note = a, c, u, g, unknown, or other
  misc_difference 30: note = a, c, u, g, unknown, or other
  misc_difference 32: note = a, c, u, g, unknown, or other
  misc_difference 33: note = a, c, u, g, unknown, or other
  misc_difference 34: note = a, c, u, g, unknown, or other
  misc_difference 35: note = a, c, u, g, unknown, or other
  misc_difference 36: note = a, c, u, g, unknown, or other
  misc_difference 37: note = a, c, u, g, unknown, or other
  misc_difference 40: note = a, c, u, g, unknown, or other
  misc_difference 42: note = a, c, u, g, unknown, or other
  misc_difference 43: note = a, c, u, g, unknown, or other
  misc_difference 44: note = a, c, u, g, unknown, or other
  misc_difference 45: note = a, c, u, g, unknown, or other
  misc_difference 46: note = a, c, u, g, unknown, or other
  misc_difference 47: note = a, c, u, g, unknown, or other
  misc_difference 48: note = a, c, u, g, unknown, or other
  misc_difference 60: note = a, c, u, g, unknown, or other
  misc_difference 61: note = a, c, u, g, unknown, or other
  misc_difference 62: note = a, c, u, g, unknown, or other
  misc_difference 63: note = a, c, u, g, unknown, or other
  misc_difference 64: note = a, c, u, g, unknown, or other
  misc_difference 65: note = a, c, u, g, unknown, or other
  misc_difference 66: note = a, c, u, g, unknown, or other
  misc_difference 67: note = a, c, u, g, unknown, or other
  misc_difference 68: note = a, c, u, g, unknown, or other
  misc_difference 69: note = a, c, u, g, unknown, or other
  misc_difference 70: note = a, c, u, g, unknown, or other
  misc_difference 78: note = a, c, u, g, unknown, or other
  misc_difference 79: note = a, c, u, g, unknown, or other
  misc_difference 81: note = a, c, u, g, unknown, or other
  misc_difference 82: note = a, c, u, g, unknown, or other
  misc_difference 83: note = a, c, u, g, unknown, or other
  misc_difference 84: note = a, c, u, g, unknown, or other
  misc_difference 85: note = a, c, u, g, unknown, or other
  misc_difference 86: note = a, c, u, g, unknown, or other
  misc_difference 88: note = a, c, u, g, unknown, or other
  misc_difference 89: note = a, c, u, g, unknown, or other
  misc_difference 96: note = a, c, u, g, unknown, or other
  misc_difference 97: note = a, c, u, g, unknown, or other
  misc_difference 98: note = a, c, u, g, unknown, or other
  misc_difference 99: note = a, c, u, g, unknown, or other
  misc_difference 100: note = a, c, u, g, unknown, or other
  misc_difference 101: note = a, c, u, g, unknown, or other
  misc_difference 105: note = a, c, u, g, unknown, or other
  misc_difference 106: note = a, c, u, g, unknown, or other
  misc_difference 107: note = a, c, u, g, unknown, or other
  misc_difference 108: note = a, c, u, g, unknown, or other
  misc_difference 109: note = a, c, u, g, unknown, or other
  misc_difference 113: note = a, c, u, g, unknown, or other
  misc_difference 115: note = a, c, u, g, unknown, or other
  misc_difference 119: note = a, c, u, g, unknown, or other
  misc_difference 122: note = a, c, u, g, unknown, or other
  misc_difference 123: note = a, c, u, g, unknown, or other
  misc_difference 124: note = a, c, u, g, unknown, or other
  misc_difference 131: note = a, c, u, g, unknown, or other
  misc_difference 148: note = a, c, u, g, unknown, or other
  misc_difference 153: note = a, c, u, g, unknown, or other
  misc_difference 154: note = a, c, u, g, unknown, or other
  misc_difference 155: note = a, c, u, g, unknown, or other
  misc_difference 157: note = a, c, u, g, unknown, or other
  misc_difference 158: note = a, c, u, g, unknown, or other
  misc_difference 159: note = a, c, u, g, unknown, or other
  misc_difference 160: note = a, c, u, g, unknown, or other
  misc_difference 161: note = a, c, u, g, unknown, or other
  misc_difference 162: note = a, c, u, g, unknown, or other
  misc_difference 163: note = a, c, u, g, unknown, or other
  misc_difference 164: note = a, c, u, g, unknown, or other
  misc_difference 165: note = a, c, u, g, unknown, or other
  misc_difference 166: note = a, c, u, g, unknown, or other
  misc_difference 167: note = a, c, u, g, unknown, or other
  misc_difference 168: note = a, c, u, g, unknown, or other
  misc_difference 170: note = a, c, u, g, unknown, or other
  misc_difference 175: note = a, c, u, g, unknown, or other
  misc_difference 178: note = a, c, u, g, unknown, or other
  misc_difference 179: note = a, c, u, g, unknown, or other
  misc_difference 180: note = a, c, u, g, unknown, or other
  misc_difference 181: note = a, c, u, g, unknown, or other
  misc_difference 184: note = a, c, u, g, unknown, or other
  misc_difference 188: note = a, c, u, g, unknown, or other
  misc_difference 195: note = a, c, u, g, unknown, or other
  misc_difference 197: note = a, c, u, g, unknown, or other
  misc_difference 205: note = a, c, u, g, unknown, or other
  misc_difference 206: note = a, c, u, g, unknown, or other
  misc_difference 207: note = a, c, u, g, unknown, or other
  misc_difference 208: note = a, c, u, g, unknown, or other
  misc_difference 209: note = a, c, u, g, unknown, or other
  misc_difference 210: note = a, c, u, g, unknown, or other
  misc_difference 213: note = a, c, u, g, unknown, or other
  misc_difference 214: note = a, c, u, g, unknown, or other
  misc_difference 216: note = a, c, u, g, unknown, or other
  misc_difference 217: note = a, c, u, g, unknown, or other
yrnnnnnrnynrnnnyynnnnnnnnnnnnnrnnnnnnrrnynnnnnnnrrrrrryrrgrnnnnnnnnnnncyarryannynnnnnnrnnatryygnnnnnnagrnnnnnyycnynyyynyynnnytyyyynraryytgracagtayynarrgnnnynnnnnnnnnnnnancyygnrtnnnnyanragnrragrynrnrrrrrrynnnnnnyynnynn

SEQ ID NO: 795532 - RNA, 212 nt, unidentified
  source 1..212: mol_type = unassigned RNA; note = 71f61a
  misc_difference 1: note = a, c, u, g, unknown, or other
  misc_difference 2: note = a, c, u, g, unknown, or other
  misc_difference 3: note = a, c, u, g, unknown, or other
  misc_difference 4: note = a, c, u, g, unknown, or other
  misc_difference 5: note = a, c, u, g, unknown, or other
  misc_difference 6: note = a, c, u, g, unknown, or other
  misc_difference 7: note = a, c, u, g, unknown, or other
  misc_difference 8: note = a, c, u, g, unknown, or other
  misc_difference 11: note = a, c, u, g, unknown, or other
  misc_difference 12: note = a, c, u, g, unknown, or other
  misc_difference 13: note = a, c, u, g, unknown, or other
  misc_difference 14: note = a, c, u, g, unknown, or other
  misc_difference 15: note = a, c, u, g, unknown, or other
  misc_difference 16: note = a, c, u, g, unknown, or other
  misc_difference 17: note = a, c, u, g, unknown, or other
  misc_difference 18: note = a, c, u, g, unknown, or other
  misc_difference 23: note = a, c, u, g, unknown, or other
  misc_difference 24: note = a, c, u, g, unknown, or other
  misc_difference 25: note = a, c, u, g, unknown, or other
  misc_difference 38: note = a, c, u, g, unknown, or other
  misc_difference 39: note = a, c, u, g, unknown, or other
  misc_difference 40: note = a, c, u, g, unknown, or other
  misc_difference 41: note = a, c, u, g, unknown, or other
  misc_difference 42: note = a, c, u, g, unknown, or other
  misc_difference 43: note = a, c, u, g, unknown, or other
  misc_difference 44: note = a, c, u, g, unknown, or other
  misc_difference 47: note = a, c, u, g, unknown, or other
  misc_difference 48: note = a, c, u, g, unknown, or other
  misc_difference 54: note = a, c, u, g, unknown, or other
  misc_difference 55: note = a, c, u, g, unknown, or other
  misc_difference 56: note = a, c, u, g, unknown, or other
  misc_difference 57: note = a, c, u, g, unknown, or other
  misc_difference 58: note = a, c, u, g, unknown, or other
  misc_difference 59: note = a, c, u, g, unknown, or other
  misc_difference 67: note = a, c, u, g, unknown, or other
  misc_difference 68: note = a, c, u, g, unknown, or other
  misc_difference 69: note = a, c, u, g, unknown, or other
  misc_difference 70: note = a, c, u, g, unknown, or other
  misc_difference 71: note = a, c, u, g, unknown, or other
  misc_difference 72: note = a, c, u, g, unknown, or other
  misc_difference 77: note = a, c, u, g, unknown, or other
  misc_difference 88: note = a, c, u, g, unknown, or other
  misc_difference 89: note = a, c, u, g, unknown, or other
  misc_difference 90: note = a, c, u, g, unknown, or other
  misc_difference 97: note = a, c, u, g, unknown, or other
  misc_difference 100: note = a, c, u, g, unknown, or other
  misc_difference 102: note = a, c, u, g, unknown, or other
  misc_difference 104: note = a, c, u, g, unknown, or other
  misc_difference 108: note = a, c, u, g, unknown, or other
  misc_difference 109: note = a, c, u, g, unknown, or other
  misc_difference 121: note = a, c, u, g, unknown, or other
  misc_difference 139: note = a, c, u, g, unknown, or other
  misc_difference 140: note = a, c, u, g, unknown, or other
  misc_difference 141: note = a, c, u, g, unknown, or other
  misc_difference 152: note = a, c, u, g, unknown, or other
  misc_difference 159: note = a, c, u, g, unknown, or other
  misc_difference 162: note = a, c, u, g, unknown, or other
  misc_difference 165: note = a, c, u, g, unknown, or other
  misc_difference 168: note = a, c, u, g, unknown, or other
  misc_difference 169: note = a, c, u, g, unknown, or other
  misc_difference 170: note = a, c, u, g, unknown, or other
  misc_difference 175: note = a, c, u, g, unknown, or other
  misc_difference 176: note = a, c, u, g, unknown, or other
  misc_difference 177: note = a, c, u, g, unknown, or other
  misc_difference 178: note = a, c, u, g, unknown, or other
  misc_difference 179: note = a, c, u, g, unknown, or other
  misc_difference 180: note = a, c, u, g, unknown, or other
  misc_difference 181: note = a, c, u, g, unknown, or other
  misc_difference 182: note = a, c, u, g, unknown, or other
  misc_difference 183: note = a, c, u, g, unknown, or other
  misc_difference 184: note = a, c, u, g, unknown, or other
  misc_difference 185: note = a, c, u, g, unknown, or other
  misc_difference 186: note = a, c, u, g, unknown, or other
  misc_difference 193: note = a, c, u, g, unknown, or other
  misc_difference 194: note = a, c, u, g, unknown, or other
  misc_difference 195: note = a, c, u, g, unknown, or other
  misc_difference 196: note = a, c, u, g, unknown, or other
  misc_difference 197: note = a, c, u, g, unknown, or other
  misc_difference 198: note = a, c, u, g, unknown, or other
  misc_difference 199: note = a, c, u, g, unknown, or other
  misc_difference 200: note = a, c, u, g, unknown, or other
  misc_difference 201: note = a, c, u, g, unknown, or other
  misc_difference 202: note = a, c, u, g, unknown, or other
  misc_difference 203: note = a, c, u, g, unknown, or other
  misc_difference 204: note = a, c, u, g, unknown, or other
  misc_difference 205: note = a, c, u, g, unknown, or other
  misc_difference 207: note = a, c, u, g, unknown, or other
  misc_difference 208: note = a, c, u, g, unknown, or other
  misc_difference 209: note = a, c, u, g, unknown, or other
  misc_difference 210: note = a, c, u, g, unknown, or other
  misc_difference 211: note = a, c, u, g, unknown, or other
  misc_difference 212: note = a, c, u, g, unknown, or other
nnnnnnnnrynnnnnnnnyycrnnngggygacctycrnnnnnnnyynngrycynnnnnngagryycnnnnnnagtynyraggcrcccnnnrrgryrnyynrnyngrynnratryccraygnrgcygayyygrygccgynnnrcggacryycnayryganagnyyngrnnnayccnnnnnnnnnnnnycyrrrnnnnnnnnnnnnnrnnnnnn

SEQ ID NO: 795533 - RNA, 250 nt, unidentified
  source 1..250: mol_type = unassigned RNA; note = d71e3c
  misc_difference 1: note = a, c, u, g, unknown, or other
  misc_difference 2: note = a, c, u, g, unknown, or other
  misc_difference 4: note = a, c, u, g, unknown, or other
  misc_difference 7: note = a, c, u, g, unknown, or other
  misc_difference 9: note = a, c, u, g, unknown, or other
  misc_difference 10: note = a, c, u, g, unknown, or other
  misc_difference 11: note = a, c, u, g, unknown, or other
  misc_difference 12: note = a, c, u, g, unknown, or other
  misc_difference 13: note = a, c, u, g, unknown, or other
  misc_difference 14: note = a, c, u, g, unknown, or other
  misc_difference 15: note = a, c, u, g, unknown, or other
  misc_difference 18: note = a, c, u, g, unknown, or other
  misc_difference 20: note = a, c, u, g, unknown, or other
  misc_difference 28: note = a, c, u, g, unknown, or other
  misc_difference 32: note = a, c, u, g, unknown, or other
  misc_difference 33: note = a, c, u, g, unknown, or other
  misc_difference 36: note = a, c, u, g, unknown, or other
  misc_difference 38: note = a, c, u, g, unknown, or other
  misc_difference 39: note = a, c, u, g, unknown, or other
  misc_difference 44: note = a, c, u, g, unknown, or other
  misc_difference 45: note = a, c, u, g, unknown, or other
  misc_difference 47: note = a, c, u, g, unknown, or other
  misc_difference 49: note = a, c, u, g, unknown, or other
  misc_difference 50: note = a, c, u, g, unknown, or other
  misc_difference 51: note = a, c, u, g, unknown, or other
  misc_difference 52: note = a, c, u, g, unknown, or other
  misc_difference 53: note = a, c, u, g, unknown, or other
  misc_difference 56: note = a, c, u, g, unknown, or other
  misc_difference 59: note = a, c, u, g, unknown, or other
  misc_difference 63: note = a, c, u, g, unknown, or other
  misc_difference 65: note = a, c, u, g, unknown, or other
  misc_difference 66: note = a, c, u, g, unknown, or other
  misc_difference 67: note = a, c, u, g, unknown, or other
  misc_difference 68: note = a, c, u, g, unknown, or other
  misc_difference 69: note = a, c, u, g, unknown, or other
  misc_difference 70: note = a, c, u, g, unknown, or other
  misc_difference 71: note = a, c, u, g, unknown, or other
  misc_difference 72: note = a, c, u, g, unknown, or other
  misc_difference 73: note = a, c, u, g, unknown, or other
  misc_difference 75: note = a, c, u, g, unknown, or other
  misc_difference 81: note = a, c, u, g, unknown, or other
  misc_difference 84: note = a, c, u, g, unknown, or other
  misc_difference 85: note = a, c, u, g, unknown, or other
  misc_difference 86: note = a, c, u, g, unknown, or other
  misc_difference 87: note = a, c, u, g, unknown, or other
  misc_difference 88: note = a, c, u, g, unknown, or other
  misc_difference 93: note = a, c, u, g, unknown, or other
  misc_difference 94: note = a, c, u, g, unknown, or other
  misc_difference 97: note = a, c, u, g, unknown, or other
  misc_difference 98: note = a, c, u, g, unknown, or other
  misc_difference 100: note = a, c, u, g, unknown, or other
  misc_difference 101: note = a, c, u, g, unknown, or other
  misc_difference 102: note = a, c, u, g, unknown, or other
  misc_difference 103: note = a, c, u, g, unknown, or other
  misc_difference 104: note = a, c, u, g, unknown, or other
  misc_difference 105: note = a, c, u, g, unknown, or other
  misc_difference 113: note = a, c, u, g, unknown, or other
  misc_difference 116: note = a, c, u, g, unknown, or other
  misc_difference 118: note = a, c, u, g, unknown, or other
  misc_difference 121: note = a, c, u, g, unknown, or other
  misc_difference 122: note = a, c, u, g, unknown, or other
  misc_difference 123: note = a, c, u, g, unknown, or other
  misc_difference 128: note = a, c, u, g, unknown, or other
  misc_difference 129: note = a, c, u, g, unknown, or other
  misc_difference 130: note = a, c, u, g, unknown, or other
  misc_difference 131: note = a, c, u, g, unknown, or other
  misc_difference 133: note = a, c, u, g, unknown, or other
  misc_difference 134: note = a, c, u, g, unknown, or other
  misc_difference 135: note = a, c, u, g, unknown, or other
  misc_difference 137: note = a, c, u, g, unknown, or other
  misc_difference 138: note = a, c, u, g, unknown, or other
  misc_difference 141: note = a, c, u, g, unknown, or other
  misc_difference 146: note = a, c, u, g, unknown, or other
  misc_difference 151: note = a, c, u, g, unknown, or other
  misc_difference 158: note = a, c, u, g, unknown, or other
  misc_difference 159: note = a, c, u, g, unknown, or other
  misc_difference 160: note = a, c, u, g, unknown, or other
  misc_difference 161: note = a, c, u, g, unknown, or other
  misc_difference 162: note = a, c, u, g, unknown, or other
  misc_difference 165: note = a, c, u, g, unknown, or other
  misc_difference 172: note = a, c, u, g, unknown, or other
  misc_difference 173: note = a, c, u, g, unknown, or other
  misc_difference 174: note = a, c, u, g, unknown, or other
  misc_difference 176: note = a, c, u, g, unknown, or other
  misc_difference 178: note = a, c, u, g, unknown, or other
  misc_difference 182: note = a, c, u, g, unknown, or other
  misc_difference 183: note = a, c, u, g, unknown, or other
  misc_difference 184: note = a, c, u, g, unknown, or other
  misc_difference 187: note = a, c, u, g, unknown, or other
  misc_difference 189: note = a, c, u, g, unknown, or other
  misc_difference 190: note = a, c, u, g, unknown, or other
  misc_difference 192: note = a, c, u, g, unknown, or other
  misc_difference 193: note = a, c, u, g, unknown, or other
  misc_difference 195: note = a, c, u, g, unknown, or other
  misc_difference 196: note = a, c, u, g, unknown, or other
  misc_difference 197: note = a, c, u, g, unknown, or other
  misc_difference 199: note = a, c, u, g, unknown, or other
  misc_difference 200: note = a, c, u, g, unknown, or other
  misc_difference 203: note = a, c, u, g, unknown, or other
  misc_difference 204: note = a, c, u, g, unknown, or other
  misc_difference 205: note = a, c, u, g, unknown, or other
  misc_difference 206: note = a, c, u, g, unknown, or other
  misc_difference 207: note = a, c, u, g, unknown, or other
  misc_difference 208: note = a, c, u, g, unknown, or other
  misc_difference 209: note = a, c, u, g, unknown, or other
  misc_difference 211: note = a, c, u, g, unknown, or other
  misc_difference 214: note = a, c, u, g, unknown, or other
  misc_difference 216: note = a, c, u, g, unknown, or other
  misc_difference 219: note = a, c, u, g, unknown, or other
  misc_difference 220: note = a, c, u, g, unknown, or other
  misc_difference 221: note = a, c, u, g, unknown, or other
  misc_difference 222: note = a, c, u, g, unknown, or other
  misc_difference 223: note = a, c, u, g, unknown, or other
  misc_difference 224: note = a, c, u, g, unknown, or other
  misc_difference 225: note = a, c, u, g, unknown, or other
  misc_difference 226: note = a, c, u, g, unknown, or other
  misc_difference 227: note = a, c, u, g, unknown, or other
  misc_difference 229: note = a, c, u, g, unknown, or other
  misc_difference 230: note = a, c, u, g, unknown, or other
  misc_difference 231: note = a, c, u, g, unknown, or other
  misc_difference 232: note = a, c, u, g, unknown, or other
  misc_difference 233: note = a, c, u, g, unknown, or other
  misc_difference 234: note = a, c, u, g, unknown, or other
  misc_difference 235: note = a, c, u, g, unknown, or other
  misc_difference 236: note = a, c, u, g, unknown, or other
  misc_difference 237: note = a, c, u, g, unknown, or other
  misc_difference 238: note = a, c, u, g, unknown, or other
  misc_difference 240: note = a, c, u, g, unknown, or other
  misc_difference 242: note = a, c, u, g, unknown, or other
  misc_difference 243: note = a, c, u, g, unknown, or other
  misc_difference 244: note = a, c, u, g, unknown, or other
  misc_difference 245: note = a, c, u, g, unknown, or other
  misc_difference 246: note = a, c, u, g, unknown, or other
  misc_difference 247: note = a, c, u, g, unknown, or other
  misc_difference 248: note = a, c, u, g, unknown, or other
  misc_difference 249: note = a, c, u, g, unknown, or other
  misc_difference 250: note = a, c, u, g, unknown, or other
nnyncyngnnnnnnncrnrnyygryrgncgynngrnrnnryycnngnynnnnnytnygngcrncnnnnnnnnngncrygcncgnnnnnagrcnnygnnrnnnnnnccrgccgnarnrncgnnntgcrnnnnrnnncnnayncgcgnatrtnarrytgnnnnnyrnrcgycgnnngncncrynnnyynrnngnnynnnynnrrnnnnnnnrnrynrnycnnnnnnnnnrnnnnnnnnnnyngnnnnnnnnn

SEQ ID NO: 795534 - RNA, 171 nt, unidentified
  source 1..171: mol_type = unassigned RNA; note = 8c05fd
  misc_difference 1: note = a, c, u, g, unknown, or other
  misc_difference 2: note = a, c, u, g, unknown, or other
  misc_difference 3: note = a, c, u, g, unknown, or other
  misc_difference 5: note = a, c, u, g, unknown, or other
  misc_difference 6: note = a, c, u, g, unknown, or other
  misc_difference 7: note = a, c, u, g, unknown, or other
  misc_difference 11: note = a, c, u, g, unknown, or other
  misc_difference 12: note = a, c, u, g, unknown, or other
  misc_difference 13: note = a, c, u, g, unknown, or other
  misc_difference 26: note = a, c, u, g, unknown, or other
  misc_difference 27: note = a, c, u, g, unknown, or other
  misc_difference 29: note = a, c, u, g, unknown, or other
  misc_difference 30: note = a, c, u, g, unknown, or other
  misc_difference 31: note = a, c, u, g, unknown, or other
  misc_difference 32: note = a, c, u, g, unknown, or other
  misc_difference 35: note = a, c, u, g, unknown, or other
  misc_difference 36: note = a, c, u, g, unknown, or other
  misc_difference 42: note = a, c, u, g, unknown, or other
  misc_difference 43: note = a, c, u, g, unknown, or other
  misc_difference 44: note = a, c, u, g, unknown, or other
  misc_difference 45: note = a, c, u, g, unknown, or other
  misc_difference 46: note = a, c, u, g, unknown, or other
  misc_difference 47: note = a, c, u, g, unknown, or other
  misc_difference 48: note = a, c, u, g, unknown, or other
  misc_difference 49: note = a, c, u, g, unknown, or other
  misc_difference 57: note = a, c, u, g, unknown, or other
  misc_difference 58: note = a, c, u, g, unknown, or other
  misc_difference 59: note = a, c, u, g, unknown, or other
  misc_difference 60: note = a, c, u, g, unknown, or other
  misc_difference 61: note = a, c, u, g, unknown, or other
  misc_difference 62: note = a, c, u, g, unknown, or other
  misc_difference 67: note = a, c, u, g, unknown, or other
  misc_difference 79: note = a, c, u, g, unknown, or other
  misc_difference 80: note = a, c, u, g, unknown, or other
  misc_difference 81: note = a, c, u, g, unknown, or other
  misc_difference 84: note = a, c, u, g, unknown, or other
  misc_difference 85: note = a, c, u, g, unknown, or other
  misc_difference 86: note = a, c, u, g, unknown, or other
  misc_difference 87: note = a, c, u, g, unknown, or other
  misc_difference 89: note = a, c, u, g, unknown, or other
  misc_difference 90: note = a, c, u, g, unknown, or other
  misc_difference 91: note = a, c, u, g, unknown, or other
  misc_difference 97: note = a, c, u, g, unknown, or other
  misc_difference 98: note = a, c, u, g, unknown, or other
  misc_difference 106: note = a, c, u, g, unknown, or other
  misc_difference 108: note = a, c, u, g, unknown, or other
  misc_difference 110: note = a, c, u, g, unknown, or other
  misc_difference 117: note = a, c, u, g, unknown, or other
  misc_difference 119: note = a, c, u, g, unknown, or other
  misc_difference 128: note = a, c, u, g, unknown, or other
  misc_difference 129: note = a, c, u, g, unknown, or other
  misc_difference 130: note = a, c, u, g, unknown, or other
  misc_difference 131: note = a, c, u, g, unknown, or other
  misc_difference 141: note = a, c, u, g, unknown, or other
  misc_difference 142: note = a, c, u, g, unknown, or other
  misc_difference 143: note = a, c, u, g, unknown, or other
  misc_difference 144: note = a, c, u, g, unknown, or other
  misc_difference 145: note = a, c, u, g, unknown, or other
  misc_difference 146: note = a, c, u, g, unknown, or other
  misc_difference 147: note = a, c, u, g, unknown, or other
  misc_difference 149: note = a, c, u, g, unknown, or other
  misc_difference 150: note = a, c, u, g, unknown, or other
  misc_difference 151: note = a, c, u, g, unknown, or other
  misc_difference 152: note = a, c, u, g, unknown, or other
  misc_difference 153: note = a, c, u, g, unknown, or other
  misc_difference 154: note = a, c, u, g, unknown, or other
  misc_difference 155: note = a, c, u, g, unknown, or other
  misc_difference 158: note = a, c, u, g, unknown, or other
  misc_difference 159: note = a, c, u, g, unknown, or other
  misc_difference 160: note = a, c, u, g, unknown, or other
  misc_difference 161: note = a, c, u, g, unknown, or other
  misc_difference 162: note = a, c, u, g, unknown, or other
  misc_difference 163: note = a, c, u, g, unknown, or other
  misc_difference 164: note = a, c, u, g, unknown, or other
  misc_difference 165: note = a, c, u, g, unknown, or other
  misc_difference 166: note = a, c, u, g, unknown, or other
  misc_difference 167: note = a, c, u, g, unknown, or other
  misc_difference 168: note = a, c, u, g, unknown, or other
  misc_difference 169: note = a, c, u, g, unknown, or other
  misc_difference 170: note = a, c, u, g, unknown, or other
  misc_difference 171: note = a, c, u, g, unknown, or other
nnnrnnnyccnnngggygacctycrnnynnnnyynngrycynnnnnnnngagryyynnnnnnagtynyraggcrcccynnngrnnnnynnnyrgrynnratryycnangnrgcyganyngrygccrynnnnryggrcryynnnnnnnrnnnnnnnrrnnnnnnnnnnnnnn

SEQ ID NO: 795535 - RNA, 219 nt, unidentified
  source 1..219: mol_type = unassigned RNA; note = 063de1
  misc_difference 1: note = a, c, u, g, unknown, or other
  misc_difference 2: note = a, c, u, g, unknown, or other
  misc_difference 3: note = a, c, u, g, unknown, or other
  misc_difference 4: note = a, c, u, g, unknown, or other
  misc_difference 7: note = a, c, u, g, unknown, or other
  misc_difference 8: note = a, c, u, g, unknown, or other
  misc_difference 9: note = a, c, u, g, unknown, or other
  misc_difference 11: note = a, c, u, g, unknown, or other
  misc_difference 17: note = a, c, u, g, unknown, or other
  misc_difference 18: note = a, c, u, g, unknown, or other
  misc_difference 21: note = a, c, u, g, unknown, or other
  misc_difference 25: note = a, c, u, g, unknown, or other
  misc_difference 29: note = a, c, u, g, unknown, or other
  misc_difference 30: note = a, c, u, g, unknown, or other
  misc_difference 31: note = a, c, u, g, unknown, or other
  misc_difference 32: note = a, c, u, g, unknown, or other
  misc_difference 39: note = a, c, u, g, unknown, or other
  misc_difference 42: note = a, c, u, g, unknown, or other
  misc_difference 49: note = a, c, u, g, unknown, or other
  misc_difference 50: note = a, c, u, g, unknown, or other
  misc_difference 55: note = a, c, u, g, unknown, or other
  misc_difference 56: note = a, c, u, g, unknown, or other
  misc_difference 57: note = a, c, u, g, unknown, or other
  misc_difference 58: note = a, c, u, g, unknown, or other
  misc_difference 59: note = a, c, u, g, unknown, or other
  misc_difference 60: note = a, c, u, g, unknown, or other
  misc_difference 61: note = a, c, u, g, unknown, or other
  misc_difference 62: note = a, c, u, g, unknown, or other
  misc_difference 64: note = a, c, u, g, unknown, or other
  misc_difference 69: note = a, c, u, g, unknown, or other
  misc_difference 70: note = a, c, u, g, unknown, or other
  misc_difference 71: note = a, c, u, g, unknown, or other
  misc_difference 72: note = a, c, u, g, unknown, or other
  misc_difference 73: note = a, c, u, g, unknown, or other
  misc_difference 74: note = a, c, u, g, unknown, or other
  misc_difference 75: note = a, c, u, g, unknown, or other
  misc_difference 76: note = a, c, u, g, unknown, or other
  misc_difference 82: note = a, c, u, g, unknown, or other
  misc_difference 83: note = a, c, u, g, unknown, or other
  misc_difference 84: note = a, c, u, g, unknown, or other
  misc_difference 85: note = a, c, u, g, unknown, or other
  misc_difference 86: note = a, c, u, g, unknown, or other
  misc_difference 87: note = a, c, u, g, unknown, or other
  misc_difference 91: note = a, c, u, g, unknown, or other
  misc_difference 96: note = a, c, u, g, unknown, or other
  misc_difference 104: note = a, c, u, g, unknown, or other
  misc_difference 107: note = a, c, u, g, unknown, or other
  misc_difference 114: note = a, c, u, g, unknown, or other
  misc_difference 115: note = a, c, u, g, unknown, or other
  misc_difference 117: note = a, c, u, g, unknown, or other
  misc_difference 118: note = a, c, u, g, unknown, or other
  misc_difference 121: note = a, c, u, g, unknown, or other
  misc_difference 124: note = a, c, u, g, unknown, or other
  misc_difference 128: note = a, c, u, g, unknown, or other
  misc_difference 134: note = a, c, u, g, unknown, or other
  misc_difference 135: note = a, c, u, g, unknown, or other
  misc_difference 140: note = a, c, u, g, unknown, or other
  misc_difference 141: note = a, c, u, g, unknown, or other
  misc_difference 144: note = a, c, u, g, unknown, or other
  misc_difference 146: note = a, c, u, g, unknown, or other
  misc_difference 147: note = a, c, u, g, unknown, or other
  misc_difference 148: note = a, c, u, g, unknown, or other
  misc_difference 149: note = a, c, u, g, unknown, or other
  misc_difference 150: note = a, c, u, g, unknown, or other
  misc_difference 151: note = a, c, u, g, unknown, or other
  misc_difference 152: note = a, c, u, g, unknown, or other
  misc_difference 153: note = a, c, u, g, unknown, or other
  misc_difference 154: note = a, c, u, g, unknown, or other
  misc_difference 156: note = a, c, u, g, unknown, or other
  misc_difference 169: note = a, c, u, g, unknown, or other
  misc_difference 173: note = a, c, u, g, unknown, or other
  misc_difference 174: note = a, c, u, g, unknown, or other
  misc_difference 175: note = a, c, u, g, unknown, or other
  misc_difference 178: note = a, c, u, g, unknown, or other
  misc_difference 179: note = a, c, u, g, unknown, or other
  misc_difference 181: note = a, c, u, g, unknown, or other
  misc_difference 182: note = a, c, u, g, unknown, or other
  misc_difference 184: note = a, c, u, g, unknown, or other
  misc_difference 186: note = a, c, u, g, unknown, or other
  misc_difference 187: note = a, c, u, g, unknown, or other
  misc_difference 190: note = a, c, u, g, unknown, or other
  misc_difference 191: note = a, c, u, g, unknown, or other
  misc_difference 192: note = a, c, u, g, unknown, or other
  misc_difference 193: note = a, c, u, g, unknown, or other
  misc_difference 194: note = a, c, u, g, unknown, or other
  misc_difference 195: note = a, c, u, g, unknown, or other
  misc_difference 196: note = a, c, u, g, unknown, or other
  misc_difference 197: note = a, c, u, g, unknown, or other
  misc_difference 204: note = a, c, u, g, unknown, or other
  misc_difference 206: note = a, c, u, g, unknown, or other
  misc_difference 215: note = a, c, u, g, unknown, or other
  misc_difference 218: note = a, c, u, g, unknown, or other
  misc_difference 219: note = a, c, u, g, unknown, or other
nnnnyynnncngrrccnnrynyrrnyyynnnngrtccrnggnrgrcgrnnrccgnnnnnnnncnyggynnnnnnnngccgynnnnnnagantggynycgyyyynyyngagcyynnynnycncgnaygngggaynntggtnnrgnynnnnnnnnncnrccgratrygagnttrnnnggnnrnnrncnnrynnnnnnnnrrgctcnrncyyggrycnyrnn

SEQ ID NO: 795536 - RNA, 259 nt, unidentified
  source 1..259: mol_type = unassigned RNA; note = 020731 or 15263c
  misc_difference 2: note = a, c, u, g, unknown, or other
  misc_difference 3: note = a, c, u, g, unknown, or other
  misc_difference 7: note = a, c, u, g, unknown, or other
  misc_difference 9: note = a, c, u, g, unknown, or other
  misc_difference 10: note = a, c, u, g, unknown, or other
  misc_difference 13: note = a, c, u, g, unknown, or other
  misc_difference 19: note = a, c, u, g, unknown, or other
  misc_difference 21: note = a, c, u, g, unknown, or other
  misc_difference 23: note = a, c, u, g, unknown, or other
  misc_difference 26: note = a, c, u, g, unknown, or other
  misc_difference 27: note = a, c, u, g, unknown, or other
  misc_difference 28: note = a, c, u, g, unknown, or other
  misc_difference 29: note = a, c, u, g, unknown, or other
  misc_difference 30: note = a, c, u, g, unknown, or other
  misc_difference 31: note = a, c, u, g, unknown, or other
  misc_difference 32: note = a, c, u, g, unknown, or other
  misc_difference 35: note = a, c, u, g, unknown, or other
  misc_difference 36: note = a, c, u, g, unknown, or other
  misc_difference 37: note = a, c, u, g, unknown, or other
  misc_difference 39: note = a, c, u, g, unknown, or other
  misc_difference 41: note = a, c, u, g, unknown, or other
  misc_difference 42: note = a, c, u, g, unknown, or other
  misc_difference 43: note = a, c, u, g, unknown, or other
  misc_difference 44: note = a, c, u, g, unknown, or other
  misc_difference 45: note = a, c, u, g, unknown, or other
  misc_difference 47: note = a, c, u, g, unknown, or other
  misc_difference 48: note = a, c, u, g, unknown, or other
  misc_difference 50: note = a, c, u, g, unknown, or other
  misc_difference 52: note = a, c, u, g, unknown, or other
  misc_difference 58: note = a, c, u, g, unknown, or other
  misc_difference 62: note = a, c, u, g, unknown, or other
  misc_difference 63: note = a, c, u, g, unknown, or other
  misc_difference 64: note = a, c, u, g, unknown, or other
  misc_difference 67: note = a, c, u, g, unknown, or other
  misc_difference 68: note = a, c, u, g, unknown, or other
  misc_difference 69: note = a, c, u, g, unknown, or other
  misc_difference 71: note = a, c, u, g, unknown, or other
  misc_difference 72: note = a, c, u, g, unknown, or other
  misc_difference 73: note = a, c, u, g, unknown, or other
  misc_difference 74: note = a, c, u, g, unknown, or other
  misc_difference 75: note = a, c, u, g, unknown, or other
  misc_difference 76: note = a, c, u, g, unknown, or other
  misc_difference 77: note = a, c, u, g, unknown, or other
  misc_difference 78: note = a, c, u, g, unknown, or other
  misc_difference 79: note = a, c, u, g, unknown, or other
  misc_difference 80: note = a, c, u, g, unknown, or other
  misc_difference 81: note = a, c, u, g, unknown, or other
  misc_difference 82: note = a, c, u, g, unknown, or other
  misc_difference 83: note = a, c, u, g, unknown, or other
  misc_difference 84: note = a, c, u, g, unknown, or other
  misc_difference 85: note = a, c, u, g, unknown, or other
  misc_difference 86: note = a, c, u, g, unknown, or other
  misc_difference 87: note = a, c, u, g, unknown, or other
  misc_difference 88: note = a, c, u, g, unknown, or other
  misc_difference 89: note = a, c, u, g, unknown, or other
  misc_difference 90: note = a, c, u, g, unknown, or other
  misc_difference 91: note = a, c, u, g, unknown, or other
  misc_difference 93: note = a, c, u, g, unknown, or other
  misc_difference 99: note = a, c, u, g, unknown, or other
  misc_difference 100: note = a, c, u, g, unknown, or other
  misc_difference 101: note = a, c, u, g, unknown, or other
  misc_difference 102: note = a, c, u, g, unknown, or other
  misc_difference 103: note = a, c, u, g, unknown, or other
  misc_difference 105: note = a, c, u, g, unknown, or other
  misc_difference 106: note = a, c, u, g, unknown, or other
  misc_difference 114: note = a, c, u, g, unknown, or other
  misc_difference 116: note = a, c, u, g, unknown, or other
  misc_difference 117: note = a, c, u, g, unknown, or other
  misc_difference 118: note = a, c, u, g, unknown, or other
  misc_difference 119: note = a, c, u, g, unknown, or other
  misc_difference 120: note = a, c, u, g, unknown, or other
  misc_difference 121: note = a, c, u, g, unknown, or other
  misc_difference 122: note = a, c, u, g, unknown, or other
  misc_difference 123: note = a, c, u, g, unknown, or other
  misc_difference 126: note = a, c, u, g, unknown, or other
  misc_difference 127: note = a, c, u, g, unknown, or other
  misc_difference 128: note = a, c, u, g, unknown, or other
  misc_difference 131: note = a, c, u, g, unknown, or other
  misc_difference 132: note = a, c, u, g, unknown, or other
  misc_difference 133: note = a, c, u, g, unknown, or other
  misc_difference 134: note = a, c, u, g, unknown, or other
  misc_difference 139: note = a, c, u, g, unknown, or other
  misc_difference 140: note = a, c, u, g, unknown, or other
  misc_difference 142: note = a, c, u, g, unknown, or other
  misc_difference 143: note = a, c, u, g, unknown, or other
  misc_difference 144: note = a, c, u, g, unknown, or other
  misc_difference 145: note = a, c, u, g, unknown, or other
  misc_difference 146: note = a, c, u, g, unknown, or other
  misc_difference 147: note = a, c, u, g, unknown, or other
  misc_difference 151: note = a, c, u, g, unknown, or other
  misc_difference 153: note = a, c, u, g, unknown, or other
  misc_difference 160: note = a, c, u, g, unknown, or other
  misc_difference 161: note = a, c, u, g, unknown, or other
  misc_difference 163: note = a, c, u, g, unknown, or other
  misc_difference 164: note = a, c, u, g, unknown, or other
  misc_difference 165: note = a, c, u, g, unknown, or other
  misc_difference 166: note = a, c, u, g, unknown, or other
  misc_difference 167: note = a, c, u, g, unknown, or other
  misc_difference 174: note = a, c, u, g, unknown, or other
  misc_difference 180: note = a, c, u, g, unknown, or other
  misc_difference 181: note = a, c, u, g, unknown, or other
  misc_difference 182: note = a, c, u, g, unknown, or other
  misc_difference 187: note = a, c, u, g, unknown, or other
  misc_difference 190: note = a, c, u, g, unknown, or other
  misc_difference 197: note = a, c, u, g, unknown, or other
  misc_difference 202: note = a, c, u, g, unknown, or other
  misc_difference 204: note = a, c, u, g, unknown, or other
  misc_difference 205: note = a, c, u, g, unknown, or other
  misc_difference 206: note = a, c, u, g, unknown, or other
  misc_difference 207: note = a, c, u, g, unknown, or other
  misc_difference 208: note = a, c, u, g, unknown, or other
  misc_difference 211: note = a, c, u, g, unknown, or other
  misc_difference 217: note = a, c, u, g, unknown, or other
  misc_difference 218: note = a, c, u, g, unknown, or other
  misc_difference 224: note = a, c, u, g, unknown, or other
  misc_difference 227: note = a, c, u, g, unknown, or other
  misc_difference 230: note = a, c, u, g, unknown, or other
  misc_difference 234: note = a, c, u, g, unknown, or other
  misc_difference 235: note = a, c, u, g, unknown, or other
  misc_difference 237: note = a, c, u, g, unknown, or other
  misc_difference 240: note = a, c, u, g, unknown, or other
  misc_difference 245: note = a, c, u, g, unknown, or other
  misc_difference 246: note = a, c, u, g, unknown, or other
  misc_difference 252: note = a, c, u, g, unknown, or other
  misc_difference 253: note = a, c, u, g, unknown, or other
  misc_difference 254: note = a, c, u, g, unknown, or other
  misc_difference 255: note = a, c, u, g, unknown, or other
  misc_difference 256: note = a, c, u, g, unknown, or other
  misc_difference 257: note = a, c, u, g, unknown, or other
  misc_difference 258: note = a, c, u, g, unknown, or other
  misc_difference 259: note = a, c, u, g, unknown, or other
ynnyyynrnnyynyyyrynrnynrynnnnnnnrynnnynynnnnnrnnrnyngyrrrnrrynnnrynnnrnnnnnnnnnnnnnnnnnnnnnrnyrygcnnnnnynnryyacgantnnnnnnnncynnncrnnnnraygnntnnnnnnrrrnyntcgrrcnnrnnnnnrygcyyngryyynnnaacgnatnctcagrngyygncnnnnnrangrctcnnctatanggnytncgcnnrnycnrrgcnngcryrnnnnnnnn

SEQ ID NO: 795537 - RNA, 288 nt, unidentified
  source 1..288: mol_type = unassigned RNA; note = 6b1af5
  misc_difference 1: note = a, c, u, g, unknown, or other
  misc_difference 2: note = a, c, u, g, unknown, or other
  misc_difference 3: note = a, c, u, g, unknown, or other
  misc_difference 4: note = a, c, u, g, unknown, or other
  misc_difference 5: note = a, c, u, g, unknown, or other
  misc_difference 6: note = a, c, u, g, unknown, or other
  misc_difference 9: note = a, c, u, g, unknown, or other
  misc_difference 10: note = a, c, u, g, unknown, or other
  misc_difference 11: note = a, c, u, g, unknown, or other
  misc_difference 12: note = a, c, u, g, unknown, or other
  misc_difference 13: note = a, c, u, g, unknown, or other
  misc_difference 14: note = a, c, u, g, unknown, or other
  misc_difference 15: note = a, c, u, g, unknown, or other
  misc_difference 16: note = a, c, u, g, unknown, or other
  misc_difference 17: note = a, c, u, g, unknown, or other
  misc_difference 19: note = a, c, u, g, unknown, or other
  misc_difference 20: note = a, c, u, g, unknown, or other
  misc_difference 21: note = a, c, u, g, unknown, or other
  misc_difference 22: note = a, c, u, g, unknown, or other
  misc_difference 23: note = a, c, u, g, unknown, or other
  misc_difference 24: note = a, c, u, g, unknown, or other
  misc_difference 25: note = a, c, u, g, unknown, or other
  misc_difference 26: note = a, c, u, g, unknown, or other
  misc_difference 27: note = a, c, u, g, unknown, or other
  misc_difference 28: note = a, c, u, g, unknown, or other
  misc_difference 31: note = a, c, u, g, unknown, or other
  misc_difference 32: note = a, c, u, g, unknown, or other
  misc_difference 34: note = a, c, u, g, unknown, or other
  misc_difference 35: note = a, c, u, g, unknown, or other
  misc_difference 36: note = a, c, u, g, unknown, or other
  misc_difference 37: note = a, c, u, g, unknown, or other
  misc_difference 38: note = a, c, u, g, unknown, or other
  misc_difference 39: note = a, c, u, g, unknown, or other
  misc_difference 40: note = a, c, u, g, unknown, or other
  misc_difference 41: note = a, c, u, g, unknown, or other
  misc_difference 42: note = a, c, u, g, unknown, or other
  misc_difference 44: note = a, c, u, g, unknown, or other
  misc_difference 45: note = a, c, u, g, unknown, or other
  misc_difference 46: note = a, c, u, g, unknown, or other
  misc_difference 47: note = a, c, u, g, unknown, or other
  misc_difference 48: note = a, c, u, g, unknown, or other
  misc_difference 49: note = a, c, u, g, unknown, or other
  misc_difference 50: note = a, c, u, g, unknown, or other
  misc_difference 51: note = a, c, u, g, unknown, or other
  misc_difference 52: note = a, c, u, g, unknown, or other
  misc_difference 53: note = a, c, u, g, unknown, or other
  misc_difference 54: note = a, c, u, g, unknown, or other
  misc_difference 55: note = a, c, u, g, unknown, or other
  misc_difference 56: note = a, c, u, g, unknown, or other
  misc_difference 57: note = a, c, u, g, unknown, or other
  misc_difference 58: note = a, c, u, g, unknown, or other
  misc_difference 60: note = a, c, u, g, unknown, or other
  misc_difference 63: note = a, c, u, g, unknown, or other
  misc_difference 65: note = a, c, u, g, unknown, or other
  misc_difference 67: note = a, c, u, g, unknown, or other
  misc_difference 69: note = a, c, u, g, unknown, or other
  misc_difference 70: note = a, c, u, g, unknown, or other
  misc_difference 71: note = a, c, u, g, unknown, or other
  misc_difference 72: note = a, c, u, g, unknown, or other
  misc_difference 73: note = a, c, u, g, unknown, or other
  misc_difference 74: note = a, c, u, g, unknown, or other
  misc_difference 75: note = a, c, u, g, unknown, or other
  misc_difference 78: note = a, c, u, g, unknown, or other
  misc_difference 80: note = a, c, u, g, unknown, or other
  misc_difference 81: note = a, c, u, g, unknown, or other
  misc_difference 83: note = a, c, u, g, unknown, or other
  misc_difference 84: note = a, c, u, g, unknown, or other
  misc_difference 87: note = a, c, u, g, unknown, or other
  misc_difference 90: note = a, c, u, g, unknown, or other
  misc_difference 101: note = a, c, u, g, unknown, or other
  misc_difference 102: note = a, c, u, g, unknown, or other
  misc_difference 103: note = a, c, u, g, unknown, or other
  misc_difference 104: note = a, c, u, g, unknown, or other
  misc_difference 105: note = a, c, u, g, unknown, or other
  misc_difference 106: note = a, c, u, g, unknown, or other
  misc_difference 115: note = a, c, u, g, unknown, or other
  misc_difference 116: note = a, c, u, g, unknown, or other
  misc_difference 117: note = a, c, u, g, unknown, or other
  misc_difference 118: note = a, c, u, g, unknown, or other
  misc_difference 119: note = a, c, u, g, unknown, or other
  misc_difference 120: note = a, c, u, g, unknown, or other
  misc_difference 121: note = a, c, u, g, unknown, or other
  misc_difference 128: note = a, c, u, g, unknown, or other
  misc_difference 129: note = a, c, u, g, unknown, or other
  misc_difference 130: note = a, c, u, g, unknown, or other
  misc_difference 131: note = a, c, u, g, unknown, or other
  misc_difference 132: note = a, c, u, g, unknown, or other
  misc_difference 133: note = a, c, u, g, unknown, or other
  misc_difference 146: note = a, c, u, g, unknown, or other
  misc_difference 148: note = a, c, u, g, unknown, or other
  misc_difference 149: note = a, c, u, g, unknown, or other
  misc_difference 151: note = a, c, u, g, unknown, or other
  misc_difference 153: note = a, c, u, g, unknown, or other
  misc_difference 156: note = a, c, u, g, unknown, or other
  misc_difference 159: note = a, c, u, g, unknown, or other
  misc_difference 161: note = a, c, u, g, unknown, or other
  misc_difference 162: note = a, c, u, g, unknown, or other
  misc_difference 163: note = a, c, u, g, unknown, or other
  misc_difference 164: note = a, c, u, g, unknown, or other
  misc_difference 165: note = a, c, u, g, unknown, or other
  misc_difference 167: note = a, c, u, g, unknown, or other
  misc_difference 168: note = a, c, u, g, unknown, or other
  misc_difference 171: note = a, c, u, g, unknown, or other
  misc_difference 175: note = a, c, u, g, unknown, or other
  misc_difference 177: note = a, c, u, g, unknown, or other
  misc_difference 179: note = a, c, u, g, unknown, or other
  misc_difference 184: note = a, c, u, g, unknown, or other
  misc_difference 185: note = a, c, u, g, unknown, or other
  misc_difference 194: note = a, c, u, g, unknown, or other
  misc_difference 196: note = a, c, u, g, unknown, or other
  misc_difference 208: note = a, c, u, g, unknown, or other
  misc_difference 209: note = a, c, u, g, unknown, or other
  misc_difference 210: note = a, c, u, g, unknown, or other
  misc_difference 211: note = a, c, u, g, unknown, or other
  misc_difference 212: note = a, c, u, g, unknown, or other
  misc_difference 224: note = a, c, u, g, unknown, or other
  misc_difference 227: note = a, c, u, g, unknown, or other
  misc_difference 236: note = a, c, u, g, unknown, or other
  misc_difference 237: note = a, c, u, g, unknown, or other
  misc_difference 238: note = a, c, u, g, unknown, or other
  misc_difference 239: note = a, c, u, g, unknown, or other
  misc_difference 250: note = a, c, u, g, unknown, or other
  misc_difference 251: note = a, c, u, g, unknown, or other
  misc_difference 252: note = a, c, u, g, unknown, or other
  misc_difference 259: note = a, c, u, g, unknown, or other
  misc_difference 260: note = a, c, u, g, unknown, or other
  misc_difference 261: note = a, c, u, g, unknown, or other
  misc_difference 262: note = a, c, u, g, unknown, or other
  misc_difference 265: note = a, c, u, g, unknown, or other
  misc_difference 266: note = a, c, u, g, unknown, or other
  misc_difference 267: note = a, c, u, g, unknown, or other
  misc_difference 268: note = a, c, u, g, unknown, or other
  misc_difference 269: note = a, c, u, g, unknown, or other
  misc_difference 270: note = a, c, u, g, unknown, or other
  misc_difference 271: note = a, c, u, g, unknown, or other
  misc_difference 276: note = a, c, u, g, unknown, or other
  misc_difference 277: note = a, c, u, g, unknown, or other
  misc_difference 283: note = a, c, u, g, unknown, or other
  misc_difference 284: note = a, c, u, g, unknown, or other
  misc_difference 288: note = a, c, u, g, unknown, or other
nnnnnnrynnnnnnnnnynnnnnnnnnnyrnnynnnnnnnnnynnnnnnnnnnnnnnnynrynrnrnynnnnnnnyrnynnynnyrngynggyctgacycnnnnnnyrayygrcnnnnnnntgycytnnnnnngayyygtcgrcynrnnyngnrrnyrnynnnnnrnnrynrccnrncnrrygnnygtgacyynanargrgcctgrcnnnnnrgycycrtyrcngtnytgtccrynnnnycggyyrryrnnngccrycnnnnycnnnnnnnrrrrnnrrygrnnryrn

SEQ ID NO: 795538 - RNA, 192 nt, unidentified
  source 1..192: mol_type = unassigned RNA; note = 02ca61
  misc_difference 1: note = a, c, u, g, unknown, or other
  misc_difference 2: note = a, c, u, g, unknown, or other
  misc_difference 3: note = a, c, u, g, unknown, or other
  misc_difference 4: note = a, c, u, g, unknown, or other
  misc_difference 5: note = a, c, u, g, unknown, or other
  misc_difference 6: note = a, c, u, g, unknown, or other
  misc_difference 7: note = a, c, u, g, unknown, or other
  misc_difference 8: note = a, c, u, g, unknown, or other
  misc_difference 9: note = a, c, u, g, unknown, or other
  misc_difference 10: note = a, c, u, g, unknown, or other
  misc_difference 11: note = a, c, u, g, unknown, or other
  misc_difference 12: note = a, c, u, g, unknown, or other
  misc_difference 13: note = a, c, u, g, unknown, or other
  misc_difference 14: note = a, c, u, g, unknown, or other
  misc_difference 15: note = a, c, u, g, unknown, or other
  misc_difference 16: note = a, c, u, g, unknown, or other
  misc_difference 17: note = a, c, u, g, unknown, or other
  misc_difference 18: note = a, c, u, g, unknown, or other
  misc_difference 19: note = a, c, u, g, unknown, or other
  misc_difference 20: note = a, c, u, g, unknown, or other
  misc_difference 21: note = a, c, u, g, unknown, or other
  misc_difference 22: note = a, c, u, g, unknown, or other
  misc_difference 23: note = a, c, u, g, unknown, or other
  misc_difference 24: note = a, c, u, g, unknown, or other
  misc_difference 26: note = a, c, u, g, unknown, or other
  misc_difference 27: note = a, c, u, g, unknown, or other
  misc_difference 28: note = a, c, u, g, unknown, or other
  misc_difference 29: note = a, c, u, g, unknown, or other
  misc_difference 32: note = a, c, u, g, unknown, or other
  misc_difference 34: note = a, c, u, g, unknown, or other
  misc_difference 35: note = a, c, u, g, unknown, or other
  misc_difference 36: note = a, c, u, g, unknown, or other
  misc_difference 37: note = a, c, u, g, unknown, or other
  misc_difference 38: note = a, c, u, g, unknown, or other
  misc_difference 39: note = a, c, u, g, unknown, or other
  misc_difference 40: note = a, c, u, g, unknown, or other
  misc_difference 41: note = a, c, u, g, unknown, or other
  misc_difference 42: note = a, c, u, g, unknown, or other
  misc_difference 43: note = a, c, u, g, unknown, or other
  misc_difference 44: note = a, c, u, g, unknown, or other
  misc_difference 45: note = a, c, u, g, unknown, or other
  misc_difference 46: note = a, c, u, g, unknown, or other
  misc_difference 47: note = a, c, u, g, unknown, or other
  misc_difference 48: note = a, c, u, g, unknown, or other
  misc_difference 49: note = a, c, u, g, unknown, or other
  misc_difference 50: note = a, c, u, g, unknown, or other
  misc_difference 51: note = a, c, u, g, unknown, or other
  misc_difference 52: note = a, c, u, g, unknown, or other
  misc_difference 53: note = a, c, u, g, unknown, or other
  misc_difference 54: note = a, c, u, g, unknown, or other
  misc_difference 55: note = a, c, u, g, unknown, or other
  misc_difference 56: note = a, c, u, g, unknown, or other
  misc_difference 57: note = a, c, u, g, unknown, or other
  misc_difference 58: note = a, c, u, g, unknown, or other
  misc_difference 59: note = a, c, u, g, unknown, or other
  misc_difference 60: note = a, c, u, g, unknown, or other
  misc_difference 61: note = a, c, u, g, unknown, or other
  misc_difference 63: note = a, c, u, g, unknown, or other
  misc_difference 65: note = a, c, u, g, unknown, or other
  misc_difference 66: note = a, c, u, g, unknown, or other
  misc_difference 67: note = a, c, u, g, unknown, or other
  misc_difference 69: note = a, c, u, g, unknown, or other
  misc_difference 70: note = a, c, u, g, unknown, or other
  misc_difference 73: note = a, c, u, g, unknown, or other
  misc_difference 77: note = a, c, u, g, unknown, or other
  misc_difference 78: note = a, c, u, g, unknown, or other
  misc_difference 79: note = a, c, u, g, unknown, or other
  misc_difference 80: note = a, c, u, g, unknown, or other
  misc_difference 81: note = a, c, u, g, unknown, or other
  misc_difference 82: note = a, c, u, g, unknown, or other
  misc_difference 86: note = a, c, u, g, unknown, or other
  misc_difference 89: note = a, c, u, g, unknown, or other
  misc_difference 91: note = a, c, u, g, unknown, or other
  misc_difference 92: note = a, c, u, g, unknown, or other
  misc_difference 93: note = a, c, u, g, unknown, or other
  misc_difference 97: note = a, c, u, g, unknown, or other
  misc_difference 102: note = a, c, u, g, unknown, or other
  misc_difference 103: note = a, c, u, g, unknown, or other
  misc_difference 104: note = a, c, u, g, unknown, or other
  misc_difference 105: note = a, c, u, g, unknown, or other
  misc_difference 106: note = a, c, u, g, unknown, or other
  misc_difference 110: note = a, c, u, g, unknown, or other
  misc_difference 111: note = a, c, u, g, unknown, or other
  misc_difference 112: note = a, c, u, g, unknown, or other
  misc_difference 117: note = a, c, u, g, unknown, or other
  misc_difference 122: note = a, c, u, g, unknown, or other
  misc_difference 124: note = a, c, u, g, unknown, or other
  misc_difference 125: note = a, c, u, g, unknown, or other
  misc_difference 126: note = a, c, u, g, unknown, or other
  misc_difference 127: note = a, c, u, g, unknown, or other
  misc_difference 129: note = a, c, u, g, unknown, or other
  misc_difference 130: note = a, c, u, g, unknown, or other
  misc_difference 131: note = a, c, u, g, unknown, or other
  misc_difference 132: note = a, c, u, g, unknown, or other
  misc_difference 133: note = a, c, u, g, unknown, or other
  misc_difference 134: note = a, c, u, g, unknown, or other
  misc_difference 135: note = a, c, u, g, unknown, or other
  misc_difference 136: note = a, c, u, g, unknown, or other
  misc_difference 152: note = a, c, u, g, unknown, or other
  misc_difference 153: note = a, c, u, g, unknown, or other
  misc_difference 159: note = a, c, u, g, unknown, or other
  misc_difference 160: note = a, c, u, g, unknown, or other
  misc_difference 161: note = a, c, u, g, unknown, or other
  misc_difference 162: note = a, c, u, g, unknown, or other
  misc_difference 170: note = a, c, u, g, unknown, or other
  misc_difference 172: note = a, c, u, g, unknown, or other
  misc_difference 173: note = a, c, u, g, unknown, or other
  misc_difference 180: note = a, c, u, g, unknown, or other
  misc_difference 181: note = a, c, u, g, unknown, or other
  misc_difference 185: note = a, c, u, g, unknown, or other
  misc_difference 186: note = a, c, u, g, unknown, or other
  misc_difference 187: note = a, c, u, g, unknown, or other
  misc_difference 188: note = a, c, u, g, unknown, or other
  misc_difference 191: note = a, c, u, g, unknown, or other
nnnnnnnnnnnnnnnnnnnnnnnngnnnnrynynnnnnnnnnnnnnnnnnnnnnnnnnnnnrnrnnngnnagnycgnnnnnnycynggnynnnrarnccgynnnnnagcnnngrycnycrynynnnnynnnnnnnnarcycgaacrgttgynngrgccnnnngagcycgnannrcaagrnngrgnnnnrrnr

SEQ ID NO: 795539 - RNA, 228 nt, unidentified
  source 1..228: mol_type = unassigned RNA; note = 00f1aa
  misc_difference 3: note = a, c, u, g, unknown, or other
  misc_difference 4: note = a, c, u, g, unknown, or other
  misc_difference 5: note = a, c, u, g, unknown, or other
  misc_difference 6: note = a, c, u, g, unknown, or other
  misc_difference 9: note = a, c, u, g, unknown, or other
  misc_difference 16: note = a, c, u, g, unknown, or other
  misc_difference 24: note = a, c, u, g, unknown, or other
  misc_difference 46: note = a, c, u, g, unknown, or other
  misc_difference 60: note = a, c, u, g, unknown, or other
  misc_difference 61: note = a, c, u, g, unknown, or other
  misc_difference 74: note = a, c, u, g, unknown, or other
  misc_difference 76: note = a, c, u, g, unknown, or other
  misc_difference 78: note = a, c, u, g, unknown, or other
  misc_difference 93: note = a, c, u, g, unknown, or other
  misc_difference 98: note = a, c, u, g, unknown, or other
  misc_difference 104: note = a, c, u, g, unknown, or other
  misc_difference 106: note = a, c, u, g, unknown, or other
  misc_difference 119: note = a, c, u, g, unknown, or other
  misc_difference 123: note = a, c, u, g, unknown, or other
  misc_difference 124: note = a, c, u, g, unknown, or other
  misc_difference 144: note = a, c, u, g, unknown, or other
  misc_difference 151: note = a, c, u, g, unknown, or other
  misc_difference 165: note = a, c, u, g, unknown, or other
  misc_difference 175: note = a, c, u, g, unknown, or other
  misc_difference 183: note = a, c, u, g, unknown, or other
  misc_difference 184: note = a, c, u, g, unknown, or other
  misc_difference 187: note = a, c, u, g, unknown, or other
  misc_difference 188: note = a, c, u, g, unknown, or other
  misc_difference 189: note = a, c, u, g, unknown, or other
  misc_difference 190: note = a, c, u, g, unknown, or other
  misc_difference 194: note = a, c, u, g, unknown, or other
  misc_difference 201: note = a, c, u, g, unknown, or other
  misc_difference 202: note = a, c, u, g, unknown, or other
  misc_difference 203: note = a, c, u, g, unknown, or other
  misc_difference 210: note = a, c, u, g, unknown, or other
  misc_difference 211: note = a, c, u, g, unknown, or other
  misc_difference 212: note = a, c, u, g, unknown, or other
  misc_difference 213: note = a, c, u, g, unknown, or other
  misc_difference 219: note = a, c, u, g, unknown, or other
  misc_difference 220: note = a, c, u, g, unknown, or other
  misc_difference 222: note = a, c, u, g, unknown, or other
  misc_difference 225: note = a, c, u, g, unknown, or other
  misc_difference 228: note = a, c, u, g, unknown, or other
tgnnnnyangaccggngccygrcnaggctcggtyyaggygyccggnyygtcgctctcrynncggctgcccrcgnyngnygtgtggctctcryntggcntgcgcngnccggrcrycgyyngggnnrggagaggctcaagargggnytgcycngctcgaagyagcgntgccctccynrcycgaynnyynnnnyggnycgagynnnggaggrnnnnryrrrnnrngtngtn

SEQ ID NO: 795540 - RNA, 258 nt, unidentified
  source 1..258: mol_type = unassigned RNA; note = 192c69
  misc_difference 1: note = a, c, u, g, unknown, or other
  misc_difference 2: note = a, c, u, g, unknown, or other
  misc_difference 3: note = a, c, u, g, unknown, or other
  misc_difference 4: note = a, c, u, g, unknown, or other
  misc_difference 5: note = a, c, u, g, unknown, or other
  misc_difference 6: note = a, c, u, g, unknown, or other
  misc_difference 7: note = a, c, u, g, unknown, or other
  misc_difference 8: note = a, c, u, g, unknown, or other
  misc_difference 9: note = a, c, u, g, unknown, or other
  misc_difference 11: note = a, c, u, g, unknown, or other
  misc_difference 12: note = a, c, u, g, unknown, or other
  misc_difference 13: note = a, c, u, g, unknown, or other
  misc_difference 14: note = a, c, u, g, unknown, or other
  misc_difference 15: note = a, c, u, g, unknown, or other
  misc_difference 17: note = a, c, u, g, unknown, or other
  misc_difference 18: note = a, c, u, g, unknown, or other
  misc_difference 19: note = a, c, u, g, unknown, or other
  misc_difference 20: note = a, c, u, g, unknown, or other
  misc_difference 21: note = a, c, u, g, unknown, or other
  misc_difference 22: note = a, c, u, g, unknown, or other
  misc_difference 23: note = a, c, u, g, unknown, or other
  misc_difference 24: note = a, c, u, g, unknown, or other
  misc_difference 25: note = a, c, u, g, unknown, or other
  misc_difference 26: note = a, c, u, g, unknown, or other
  misc_difference 27: note = a, c, u, g, unknown, or other
  misc_difference 28: note = a, c, u, g, unknown, or other
  misc_difference 29: note = a, c, u, g, unknown, or other
  misc_difference 30: note = a, c, u, g, unknown, or other
  misc_difference 31: note = a, c, u, g, unknown, or other
  misc_difference 32: note = a, c, u, g, unknown, or other
  misc_difference 33: note = a, c, u, g, unknown, or other
  misc_difference 34: note = a, c, u, g, unknown, or other
  misc_difference 35: note = a, c, u, g, unknown, or other
  misc_difference 36: note = a, c, u, g, unknown, or other
  misc_difference 37: note = a, c, u, g, unknown, or other
  misc_difference 38: note = a, c, u, g, unknown, or other
  misc_difference 39: note = a, c, u, g, unknown, or other
  misc_difference 40: note = a, c, u, g, unknown, or other
  misc_difference 41: note = a, c, u, g, unknown, or other
  misc_difference 42: note = a, c, u, g, unknown, or other
  misc_difference 43: note = a, c, u, g, unknown, or other
  misc_difference 44: note = a, c, u, g, unknown, or other
  misc_difference 45: note = a, c, u, g, unknown, or other
  misc_difference 47: note = a, c, u, g, unknown, or other
  misc_difference 48: note = a, c, u, g, unknown, or other
  misc_difference 49: note = a, c, u, g, unknown, or other
  misc_difference 50: note = a, c, u, g, unknown, or other
  misc_difference 51: note = a, c, u, g, unknown, or other
  misc_difference 53: note = a, c, u, g, unknown, or other
  misc_difference 54: note = a, c, u, g, unknown, or other
  misc_difference 55: note = a, c, u, g, unknown, or other
  misc_difference 56: note = a, c, u, g, unknown, or other
  misc_difference 57: note = a, c, u, g, unknown, or other
  misc_difference 60: note = a, c, u, g, unknown, or other
  misc_difference 61: note = a, c, u, g, unknown, or other
  misc_difference 65: note = a, c, u, g, unknown, or other
  misc_difference 66: note = a, c, u, g, unknown, or other
  misc_difference 67: note = a, c, u, g, unknown, or other
  misc_difference 68: note = a, c, u, g, unknown, or other
  misc_difference 69: note = a, c, u, g, unknown, or other
  misc_difference 75: note = a, c, u, g, unknown, or other
  misc_difference 77: note = a, c, u, g, unknown, or other
  misc_difference 78: note = a, c, u, g, unknown, or other
  misc_difference 84: note = a, c, u, g, unknown, or other
  misc_difference 86: note = a, c, u, g, unknown, or other
  misc_difference 88: note = a, c, u, g, unknown, or other
  misc_difference 92: note = a, c, u, g, unknown, or other
  misc_difference 94: note = a, c, u, g, unknown, or other
  misc_difference 101: note = a, c, u, g, unknown, or other
  misc_difference 102: note = a, c, u, g, unknown, or other
  misc_difference 103: note = a, c, u, g, unknown, or other
  misc_difference 104: note = a, c, u, g, unknown, or other
  misc_difference 105: note = a, c, u, g, unknown, or other
  misc_difference 114: note = a, c, u, g, unknown, or other
  misc_difference 115: note = a, c, u, g, unknown, or other
  misc_difference 116: note = a, c, u, g, unknown, or other
  misc_difference 117: note = a, c, u, g, unknown, or other
  misc_difference 118: note = a, c, u, g, unknown, or other
  misc_difference 119: note = a, c, u, g, unknown, or other
  misc_difference 121: note = a, c, u, g, unknown, or other
  misc_difference 146: note = a, c, u, g, unknown, or other
  misc_difference 147: note = a, c, u, g, unknown, or other
  misc_difference 150: note = a, c, u, g, unknown, or other
  misc_difference 151: note = a, c, u, g, unknown, or other
  misc_difference 152: note = a, c, u, g, unknown, or other
  misc_difference 154: note = a, c, u, g, unknown, or other
  misc_difference 158: note = a, c, u, g, unknown, or other
  misc_difference 159: note = a, c, u, g, unknown, or other
  misc_difference 160: note = a, c, u, g, unknown, or other
  misc_difference 161: note = a, c, u, g, unknown, or other
  misc_difference 165: note = a, c, u, g, unknown, or other
  misc_difference 178: note = a, c, u, g, unknown, or other
  misc_difference 181: note = a, c, u, g, unknown, or other
  misc_difference 183: note = a, c, u, g, unknown, or other
  misc_difference 184: note = a, c, u, g, unknown, or other
  misc_difference 185: note = a, c, u, g, unknown, or other
  misc_difference 186: note = a, c, u, g, unknown, or other
  misc_difference 187: note = a, c, u, g, unknown, or other
  misc_difference 188: note = a, c, u, g, unknown, or other
  misc_difference 189: note = a, c, u, g, unknown, or other
  misc_difference 190: note = a, c, u, g, unknown, or other
  misc_difference 191: note = a, c, u, g, unknown, or other
  misc_difference 192: note = a, c, u, g, unknown, or other
  misc_difference 193: note = a, c, u, g, unknown, or other
  misc_difference 194: note = a, c, u, g, unknown, or other
  misc_difference 196: note = a, c, u, g, unknown, or other
  misc_difference 198: note = a, c, u, g, unknown, or other
  misc_difference 200: note = a, c, u, g, unknown, or other
  misc_difference 201: note = a, c, u, g, unknown, or other
  misc_difference 202: note = a, c, u, g, unknown, or other
  misc_difference 203: note = a, c, u, g, unknown, or other
  misc_difference 204: note = a, c, u, g, unknown, or other
  misc_difference 220: note = a, c, u, g, unknown, or other
  misc_difference 221: note = a, c, u, g, unknown, or other
  misc_difference 222: note = a, c, u, g, unknown, or other
  misc_difference 223: note = a, c, u, g, unknown, or other
  misc_difference 224: note = a, c, u, g, unknown, or other
  misc_difference 225: note = a, c, u, g, unknown, or other
  misc_difference 226: note = a, c, u, g, unknown, or other
  misc_difference 230: note = a, c, u, g, unknown, or other
  misc_difference 232: note = a, c, u, g, unknown, or other
  misc_difference 233: note = a, c, u, g, unknown, or other
  misc_difference 234: note = a, c, u, g, unknown, or other
  misc_difference 235: note = a, c, u, g, unknown, or other
  misc_difference 236: note = a, c, u, g, unknown, or other
  misc_difference 237: note = a, c, u, g, unknown, or other
  misc_difference 238: note = a, c, u, g, unknown, or other
  misc_difference 245: note = a, c, u, g, unknown, or other
  misc_difference 248: note = a, c, u, g, unknown, or other
  misc_difference 249: note = a, c, u, g, unknown, or other
  misc_difference 250: note = a, c, u, g, unknown, or other
  misc_difference 251: note = a, c, u, g, unknown, or other
  misc_difference 253: note = a, c, u, g, unknown, or other
  misc_difference 254: note = a, c, u, g, unknown, or other
nnnnnnnnnrnnnnnynnnnnnnnnnnnnnnnnnnnnnnnnnnnntnnnnnynnnnnyrnnycynnnnnrggrynrnngrycrnyngnycyngnaygrcynnnnncccctgycnnnnnnangrycyggggggtgytgycrccggrnnygnnngnygynnnnracnrctgataggracnygncnnnnnnnnnnnnrngncnnnnngtaaygtggrtgycgnnnnnnnryrncnnnnnnnygrycrnyynnnnynnrrrr

SEQ ID NO: 795541 - RNA, 213 nt, unidentified
  source 1..213: mol_type = unassigned RNA; note = 072bf5
  misc_difference 1: note = a, c, u, g, unknown, or other
  misc_difference 2: note = a, c, u, g, unknown, or other
  misc_difference 3: note = a, c, u, g, unknown, or other
  misc_difference 5: note = a, c, u, g, unknown, or other
  misc_difference 10: note = a, c, u, g, unknown, or other
  misc_difference 11: note = a, c, u, g, unknown, or other
  misc_difference 17: note = a, c, u, g, unknown, or other
  misc_difference 18: note = a, c, u, g, unknown, or other
  misc_difference 19: note = a, c, u, g, unknown, or other
  misc_difference 20: note = a, c, u, g, unknown, or other
  misc_difference 21: note = a, c, u, g, unknown, or other
  misc_difference 22: note = a, c, u, g, unknown, or other
  misc_difference 23: note = a, c, u, g, unknown, or other
  misc_difference 24: note = a, c, u, g, unknown, or other
  misc_difference 25: note = a, c, u, g, unknown, or other
  misc_difference 34: note = a, c, u, g, unknown, or other
  misc_difference 35: note = a, c, u, g, unknown, or other
  misc_difference 38: note = a, c, u, g, unknown, or other
  misc_difference 49: note = a, c, u, g, unknown, or other
  misc_difference 50: note = a, c, u, g, unknown, or other
  misc_difference 51: note = a, c, u, g, unknown, or other
  misc_difference 54: note = a, c, u, g, unknown, or other
  misc_difference 56: note = a, c, u, g, unknown, or other
  misc_difference 57: note = a, c, u, g, unknown, or other
  misc_difference 65: note = a, c, u, g, unknown, or other
  misc_difference 66: note = a, c, u, g, unknown, or other
  misc_difference 67: note = a, c, u, g, unknown, or other
  misc_difference 68: note = a, c, u, g, unknown, or other
  misc_difference 69: note = a, c, u, g, unknown, or other
  misc_difference 70: note = a, c, u, g, unknown, or other
  misc_difference 71: note = a, c, u, g, unknown, or other
  misc_difference 73: note = a, c, u, g, unknown, or other
  misc_difference 74: note = a, c, u, g, unknown, or other
  misc_difference 75: note = a, c, u, g, unknown, or other
  misc_difference 77: note = a, c, u, g, unknown, or other
  misc_difference 78: note = a, c, u, g, unknown, or other
  misc_difference 80: note = a, c, u, g, unknown, or other
  misc_difference 81: note = a, c, u, g, unknown, or other
  misc_difference 82: note = a, c, u, g, unknown, or other
  misc_difference 86: note = a, c, u, g, unknown, or other
  misc_difference 87: note = a, c, u, g, unknown, or other
  misc_difference 90: note = a, c, u, g, unknown, or other
  misc_difference 91: note = a, c, u, g, unknown, or other
  misc_difference 92: note = a, c, u, g, unknown, or other
  misc_difference 93: note = a, c, u, g, unknown, or other
  misc_difference 94: note = a, c, u, g, unknown, or other
  misc_difference 95: note = a, c, u, g, unknown, or other
  misc_difference 99: note = a, c, u, g, unknown, or other
  misc_difference 100: note = a, c, u, g, unknown, or other
  misc_difference 104: note = a, c, u, g, unknown, or other
  misc_difference 105: note = a, c, u, g, unknown, or other
  misc_difference 111: note = a, c, u, g, unknown, or other
  misc_difference 112: note = a, c, u, g, unknown, or other
  misc_difference 118: note = a, c, u, g, unknown, or other
  misc_difference 119: note = a, c, u, g, unknown, or other
  misc_difference 120: note = a, c, u, g, unknown, or other
  misc_difference 126: note = a, c, u, g, unknown, or other
  misc_difference 131: note = a, c, u, g, unknown, or other
  misc_difference 133: note = a, c, u, g, unknown, or other
  misc_difference 135: note = a, c, u, g, unknown, or other
  misc_difference 136: note = a, c, u, g, unknown, or other
  misc_difference 137: note = a, c, u, g, unknown, or other
  misc_difference 138: note = a, c, u, g, unknown, or other
  misc_difference 139: note = a, c, u, g, unknown, or other
  misc_difference 140: note = a, c, u, g, unknown, or other
  misc_difference 141: note = a, c, u, g, unknown, or other
  misc_difference 142: note = a, c, u, g, unknown, or other
  misc_difference 143: note = a, c, u, g, unknown, or other
  misc_difference 145: note = a, c, u, g, unknown, or other
  misc_difference 148: note = a, c, u, g, unknown, or other
  misc_difference 149: note = a, c, u, g, unknown, or other
  misc_difference 150: note = a, c, u, g, unknown, or other
  misc_difference 151: note = a, c, u, g, unknown, or other
  misc_difference 152: note = a, c, u, g, unknown, or other
  misc_difference 155: note = a, c, u, g, unknown, or other
  misc_difference 168: note = a, c, u, g, unknown, or other
  misc_difference 173: note = a, c, u, g, unknown, or other
  misc_difference 177: note = a, c, u, g, unknown, or other
  misc_difference 181: note = a, c, u, g, unknown, or other
  misc_difference 182: note = a, c, u, g, unknown, or other
  misc_difference 183: note = a, c, u, g, unknown, or other
  misc_difference 184: note = a, c, u, g, unknown, or other
  misc_difference 185: note = a, c, u, g, unknown, or other
  misc_difference 186: note = a, c, u, g, unknown, or other
  misc_difference 188: note = a, c, u, g, unknown, or other
  misc_difference 190: note = a, c, u, g, unknown, or other
  misc_difference 194: note = a, c, u, g, unknown, or other
  misc_difference 195: note = a, c, u, g, unknown, or other
  misc_difference 196: note = a, c, u, g, unknown, or other
  misc_difference 197: note = a, c, u, g, unknown, or other
  misc_difference 198: note = a, c, u, g, unknown, or other
  misc_difference 199: note = a, c, u, g, unknown, or other
  misc_difference 200: note = a, c, u, g, unknown, or other
  misc_difference 201: note = a, c, u, g, unknown, or other
  misc_difference 208: note = a, c, u, g, unknown, or other
  misc_difference 209: note = a, c, u, g, unknown, or other
  misc_difference 210: note = a, c, u, g, unknown, or other
  misc_difference 211: note = a, c, u, g, unknown, or other
nnnrnyygcnnrrryrnnnnnnnnntgatgryrnnrynggtyrrrccgnnnyynrnnrarccygnnnnnnnynnngnnynnnrarnncgnnnnnnygrnnrggnnyyrrynngcgrannncatyrnggycngnrnnnnnnnnnyncrnnnnnagnccgrayryayrrnygcanycynrcynnnnnnynynryynnnnnnnnyttgcrnnnnrr

SEQ ID NO: 795542 - RNA, 194 nt, unidentified
  source 1..194: mol_type = unassigned RNA; note = 39cbf2
  misc_difference 1: note = a, c, u, g, unknown, or other
  misc_difference 4: note = a, c, u, g, unknown, or other
  misc_difference 5: note = a, c, u, g, unknown, or other
  misc_difference 6: note = a, c, u, g, unknown, or other
  misc_difference 7: note = a, c, u, g, unknown, or other
  misc_difference 9: note = a, c, u, g, unknown, or other
  misc_difference 13: note = a, c, u, g, unknown, or other
  misc_difference 17: note = a, c, u, g, unknown, or other
  misc_difference 18: note = a, c, u, g, unknown, or other
  misc_difference 20: note = a, c, u, g, unknown, or other
  misc_difference 21: note = a, c, u, g, unknown, or other
  misc_difference 25: note = a, c, u, g, unknown, or other
  misc_difference 26: note = a, c, u, g, unknown, or other
  misc_difference 27: note = a, c, u, g, unknown, or other
  misc_difference 28: note = a, c, u, g, unknown, or other
  misc_difference 29: note = a, c, u, g, unknown, or other
  misc_difference 30: note = a, c, u, g, unknown, or other
  misc_difference 31: note = a, c, u, g, unknown, or other
  misc_difference 32: note = a, c, u, g, unknown, or other
  misc_difference 33: note = a, c, u, g, unknown, or other
  misc_difference 34: note = a, c, u, g, unknown, or other
  misc_difference 35: note = a, c, u, g, unknown, or other
  misc_difference 36: note = a, c, u, g, unknown, or other
  misc_difference 37: note = a, c, u, g, unknown, or other
  misc_difference 38: note = a, c, u, g, unknown, or other
  misc_difference 39: note = a, c, u, g, unknown, or other
  misc_difference 40: note = a, c, u, g, unknown, or other
  misc_difference 41: note = a, c, u, g, unknown, or other
  misc_difference 42: note = a, c, u, g, unknown, or other
  misc_difference 43: note = a, c, u, g, unknown, or other
  misc_difference 45: note = a, c, u, g, unknown, or other
  misc_difference 47: note = a, c, u, g, unknown, or other
  misc_difference 49: note = a, c, u, g, unknown, or other
  misc_difference 52: note = a, c, u, g, unknown, or other
  misc_difference 53: note = a, c, u, g, unknown, or other
  misc_difference 55: note = a, c, u, g, unknown, or other
  misc_difference 62: note = a, c, u, g, unknown, or other
  misc_difference 63: note = a, c, u, g, unknown, or other
  misc_difference 64: note = a, c, u, g, unknown, or other
  misc_difference 65: note = a, c, u, g, unknown, or other
  misc_difference 66: note = a, c, u, g, unknown, or other
  misc_difference 67: note = a, c, u, g, unknown, or other
  misc_difference 68: note = a, c, u, g, unknown, or other
  misc_difference 69: note = a, c, u, g, unknown, or other
  misc_difference 70: note = a, c, u, g, unknown, or other
  misc_difference 78: note = a, c, u, g, unknown, or other
  misc_difference 79: note = a, c, u, g, unknown, or other
  misc_difference 80: note = a, c, u, g, unknown, or other
  misc_difference 81: note = a, c, u, g, unknown, or other
  misc_difference 82: note = a, c, u, g, unknown, or other
  misc_difference 83: note = a, c, u, g, unknown, or other
  misc_difference 86: note = a, c, u, g, unknown, or other
  misc_difference 91: note = a, c, u, g, unknown, or other
  misc_difference 92: note = a, c, u, g, unknown, or other
  misc_difference 93: note = a, c, u, g, unknown, or other
  misc_difference 94: note = a, c, u, g, unknown, or other
  misc_difference 95: note = a, c, u, g, unknown, or other
  misc_difference 96: note = a, c, u, g, unknown, or other
  misc_difference 100: note = a, c, u, g, unknown, or other
  misc_difference 109: note = a, c, u, g, unknown, or other
  misc_difference 110: note = a, c, u, g, unknown, or other
  misc_difference 112: note = a, c, u, g, unknown, or other
  misc_difference 113: note = a, c, u, g, unknown, or other
  misc_difference 117: note = a, c, u, g, unknown, or other
  misc_difference 121: note = a, c, u, g, unknown, or other
  misc_difference 124: note = a, c, u, g, unknown, or other
  misc_difference 126: note = a, c, u, g, unknown, or other
  misc_difference 127: note = a, c, u, g, unknown, or other
  misc_difference 133: note = a, c, u, g, unknown, or other
  misc_difference 134: note = a, c, u, g, unknown, or other
  misc_difference 135: note = a, c, u, g, unknown, or other
  misc_difference 136: note = a, c, u, g, unknown, or other
  misc_difference 137: note = a, c, u, g, unknown, or other
  misc_difference 138: note = a, c, u, g, unknown, or other
  misc_difference 139: note = a, c, u, g, unknown, or other
  misc_difference 140: note = a, c, u, g, unknown, or other
  misc_difference 141: note = a, c, u, g, unknown, or other
  misc_difference 142: note = a, c, u, g, unknown, or other
  misc_difference 143: note = a, c, u, g, unknown, or other
  misc_difference 144: note = a, c, u, g, unknown, or other
  misc_difference 145: note = a, c, u, g, unknown, or other
  misc_difference 146: note = a, c, u, g, unknown, or other
  misc_difference 147: note = a, c, u, g, unknown, or other
  misc_difference 149: note = a, c, u, g, unknown, or other
  misc_difference 150: note = a, c, u, g, unknown, or other
  misc_difference 152: note = a, c, u, g, unknown, or other
  misc_difference 157: note = a, c, u, g, unknown, or other
  misc_difference 166: note = a, c, u, g, unknown, or other
  misc_difference 171: note = a, c, u, g, unknown, or other
  misc_difference 172: note = a, c, u, g, unknown, or other
  misc_difference 173: note = a, c, u, g, unknown, or other
  misc_difference 174: note = a, c, u, g, unknown, or other
  misc_difference 176: note = a, c, u, g, unknown, or other
  misc_difference 180: note = a, c, u, g, unknown, or other
  misc_difference 181: note = a, c, u, g, unknown, or other
  misc_difference 182: note = a, c, u, g, unknown, or other
  misc_difference 183: note = a, c, u, g, unknown, or other
  misc_difference 184: note = a, c, u, g, unknown, or other
  misc_difference 185: note = a, c, u, g, unknown, or other
  misc_difference 187: note = a, c, u, g, unknown, or other
  misc_difference 188: note = a, c, u, g, unknown, or other
  misc_difference 191: note = a, c, u, g, unknown, or other
  misc_difference 193: note = a, c, u, g, unknown, or other
  misc_difference 194: note = a, c, u, g, unknown, or other
nrannnnynrrtnygrnnrnnggtnnnnnnnnnnnnnnnnnnnrnrnrnrrnnrnyggytgnnnnnnnnnytgggrynnnnnnrancccgnnnnnnygantarcrrccnnynnycgnayynrynynntgggrnnnnnnnnnnnnnnnrnnancccgnatagaygyntgrynnnnynycrnnnnnnynnyynrnn

SEQ ID NO: 795543 - RNA, 164 nt, unidentified
  source 1..164: mol_type = unassigned RNA; note = 1d84d5
  misc_difference 2: note = a, c, u, g, unknown, or other
  misc_difference 3: note = a, c, u, g, unknown, or other
  misc_difference 4: note = a, c, u, g, unknown, or other
  misc_difference 5: note = a, c, u, g, unknown, or other
  misc_difference 6: note = a, c, u, g, unknown, or other
  misc_difference 7: note = a, c, u, g, unknown, or other
  misc_difference 8: note = a, c, u, g, unknown, or other
  misc_difference 9: note = a, c, u, g, unknown, or other
  misc_difference 10: note = a, c, u, g, unknown, or other
  misc_difference 17: note = a, c, u, g, unknown, or other
  misc_difference 18: note = a, c, u, g, unknown, or other
  misc_difference 33: note = a, c, u, g, unknown, or other
  misc_difference 34: note = a, c, u, g, unknown, or other
  misc_difference 35: note = a, c, u, g, unknown, or other
  misc_difference 36: note = a, c, u, g, unknown, or other
  misc_difference 37: note = a, c, u, g, unknown, or other
  misc_difference 38: note = a, c, u, g, unknown, or other
  misc_difference 39: note = a, c, u, g, unknown, or other
  misc_difference 43: note = a, c, u, g, unknown, or other
  misc_difference 48: note = a, c, u, g, unknown, or other
  misc_difference 49: note = a, c, u, g, unknown, or other
  misc_difference 50: note = a, c, u, g, unknown, or other
  misc_difference 58: note = a, c, u, g, unknown, or other
  misc_difference 59: note = a, c, u, g, unknown, or other
  misc_difference 60: note = a, c, u, g, unknown, or other
  misc_difference 61: note = a, c, u, g, unknown, or other
  misc_difference 62: note = a, c, u, g, unknown, or other
  misc_difference 63: note = a, c, u, g, unknown, or other
  misc_difference 67: note = a, c, u, g, unknown, or other
  misc_difference 68: note = a, c, u, g, unknown, or other
  misc_difference 83: note = a, c, u, g, unknown, or other
  misc_difference 84: note = a, c, u, g, unknown, or other
  misc_difference 85: note = a, c, u, g, unknown, or other
  misc_difference 86: note = a, c, u, g, unknown, or other
  misc_difference 87: note = a, c, u, g, unknown, or other
  misc_difference 96: note = a, c, u, g, unknown, or other
  misc_difference 98: note = a, c, u, g, unknown, or other
  misc_difference 103: note = a, c, u, g, unknown, or other
  misc_difference 119: note = a, c, u, g, unknown, or other
  misc_difference 137: note = a, c, u, g, unknown, or other
  misc_difference 142: note = a, c, u, g, unknown, or other
  misc_difference 143: note = a, c, u, g, unknown, or other
  misc_difference 144: note = a, c, u, g, unknown, or other
  misc_difference 145: note = a, c, u, g, unknown, or other
  misc_difference 146: note = a, c, u, g, unknown, or other
  misc_difference 154: note = a, c, u, g, unknown, or other
  misc_difference 155: note = a, c, u, g, unknown, or other
  misc_difference 160: note = a, c, u, g, unknown, or other
  misc_difference 162: note = a, c, u, g, unknown, or other
  misc_difference 163: note = a, c, u, g, unknown, or other
  misc_difference 164: note = a, c, u, g, unknown, or other
rnnnnnnnnnygryyrnnyygyyrrgagyrccnnnnnnnyccngygcnnnragcrccnnnnnnggannygyrccyyrryrrgnnnnnccgyrryrnanrtccngtrggragtygcgcynygagcgccrgtacagggnygaynnnnnryyryggnnrrycnrnnn

SEQ ID NO: 795544 - RNA, 219 nt, unidentified
  source 1..219: mol_type = unassigned RNA; note = 058384
  misc_difference 1: note = a, c, u, g, unknown, or other
  misc_difference 2: note = a, c, u, g, unknown, or other
  misc_difference 3: note = a, c, u, g, unknown, or other
  misc_difference 8: note = a, c, u, g, unknown, or other
  misc_difference 9: note = a, c, u, g, unknown, or other
  misc_difference 12: note = a, c, u, g, unknown, or other
  misc_difference 17: note = a, c, u, g, unknown, or other
  misc_difference 18: note = a, c, u, g, unknown, or other
  misc_difference 19: note = a, c, u, g, unknown, or other
  misc_difference 23: note = a, c, u, g, unknown, or other
  misc_difference 24: note = a, c, u, g, unknown, or other
  misc_difference 25: note = a, c, u, g, unknown, or other
  misc_difference 26: note = a, c, u, g, unknown, or other
  misc_difference 27: note = a, c, u, g, unknown, or other
  misc_difference 28: note = a, c, u, g, unknown, or other
  misc_difference 32: note = a, c, u, g, unknown, or other
  misc_difference 38: note = a, c, u, g, unknown, or other
  misc_difference 40: note = a, c, u, g, unknown, or other
  misc_difference 41: note = a, c, u, g, unknown, or other
  misc_difference 44: note = a, c, u, g, unknown, or other
  misc_difference 51: note = a, c, u, g, unknown, or other
  misc_difference 52: note = a, c, u, g, unknown, or other
  misc_difference 53: note = a, c, u, g, unknown, or other
  misc_difference 55: note = a, c, u, g, unknown, or other
  misc_difference 56: note = a, c, u, g, unknown, or other
  misc_difference 57: note = a, c, u, g, unknown, or other
  misc_difference 59: note = a, c, u, g, unknown, or other
  misc_difference 60: note = a, c, u, g, unknown, or other
  misc_difference 61: note = a, c, u, g, unknown, or other
  misc_difference 62: note = a, c, u, g, unknown, or other
  misc_difference 63: note = a, c, u, g, unknown, or other
  misc_difference 64: note = a, c, u, g, unknown, or other
  misc_difference 71: note = a, c, u, g, unknown, or other
  misc_difference 72: note = a, c, u, g, unknown, or other
  misc_difference 73: note = a, c, u, g, unknown, or other
  misc_difference 74: note = a, c, u, g, unknown, or other
  misc_difference 75: note = a, c, u, g, unknown, or other
  misc_difference 76: note = a, c, u, g, unknown, or other
  misc_difference 77: note = a, c, u, g, unknown, or other
  misc_difference 78: note = a, c, u, g, unknown, or other
  misc_difference 79: note = a, c, u, g, unknown, or other
  misc_difference 80: note = a, c, u, g, unknown, or other
  misc_difference 81: note = a, c, u, g, unknown, or other
  misc_difference 84: note = a, c, u, g, unknown, or other
  misc_difference 85: note = a, c, u, g, unknown, or other
  misc_difference 88: note = a, c, u, g, unknown, or other
  misc_difference 89: note = a, c, u, g, unknown, or other
  misc_difference 90: note = a, c, u, g, unknown, or other
  misc_difference 92: note = a, c, u, g, unknown, or other
  misc_difference 93: note = a, c, u, g, unknown, or other
  misc_difference 96: note = a, c, u, g, unknown, or other
  misc_difference 97: note = a, c, u, g, unknown, or other
  misc_difference 98: note = a, c, u, g, unknown, or other
  misc_difference 99: note = a, c, u, g, unknown, or other
  misc_difference 100: note = a, c, u, g, unknown, or other
  misc_difference 101: note = a, c, u, g, unknown, or other
  misc_difference 102: note = a, c, u, g, unknown, or other
  misc_difference 103: note = a, c, u, g, unknown, or other
  misc_difference 106: note = a, c, u, g, unknown, or other
  misc_difference 110: note = a, c, u, g, unknown, or other
  misc_difference 111: note = a, c, u, g, unknown, or other
  misc_difference 112: note = a, c, u, g, unknown, or other
  misc_difference 113: note = a, c, u, g, unknown, or other
  misc_difference 114: note = a, c, u, g, unknown, or other
  misc_difference 116: note = a, c, u, g, unknown, or other
  misc_difference 117: note = a, c, u, g, unknown, or other
  misc_difference 118: note = a, c, u, g, unknown, or other
  misc_difference 125: note = a, c, u, g, unknown, or other
  misc_difference 130: note = a, c, u, g, unknown, or other
  misc_difference 132: note = a, c, u, g, unknown, or other
  misc_difference 135: note = a, c, u, g, unknown, or other
  misc_difference 137: note = a, c, u, g, unknown, or other
  misc_difference 139: note = a, c, u, g, unknown, or other
  misc_difference 142: note = a, c, u, g, unknown, or other
  misc_difference 143: note = a, c, u, g, unknown, or other
  misc_difference 144: note = a, c, u, g, unknown, or other
  misc_difference 145: note = a, c, u, g, unknown, or other
  misc_difference 146: note = a, c, u, g, unknown, or other
  misc_difference 147: note = a, c, u, g, unknown, or other
  misc_difference 148: note = a, c, u, g, unknown, or other
  misc_difference 149: note = a, c, u, g, unknown, or other
  misc_difference 150: note = a, c, u, g, unknown, or other
  misc_difference 151: note = a, c, u, g, unknown, or other
  misc_difference 153: note = a, c, u, g, unknown, or other
  misc_difference 155: note = a, c, u, g, unknown, or other
  misc_difference 156: note = a, c, u, g, unknown, or other
  misc_difference 157: note = a, c, u, g, unknown, or other
  misc_difference 159: note = a, c, u, g, unknown, or other
  misc_difference 162: note = a, c, u, g, unknown, or other
  misc_difference 168: note = a, c, u, g, unknown, or other
  misc_difference 170: note = a, c, u, g, unknown, or other
  misc_difference 172: note = a, c, u, g, unknown, or other
  misc_difference 173: note = a, c, u, g, unknown, or other
  misc_difference 174: note = a, c, u, g, unknown, or other
  misc_difference 175: note = a, c, u, g, unknown, or other
  misc_difference 183: note = a, c, u, g, unknown, or other
  misc_difference 184: note = a, c, u, g, unknown, or other
  misc_difference 185: note = a, c, u, g, unknown, or other
  misc_difference 189: note = a, c, u, g, unknown, or other
  misc_difference 196: note = a, c, u, g, unknown, or other
  misc_difference 197: note = a, c, u, g, unknown, or other
  misc_difference 200: note = a, c, u, g, unknown, or other
  misc_difference 201: note = a, c, u, g, unknown, or other
  misc_difference 202: note = a, c, u, g, unknown, or other
  misc_difference 203: note = a, c, u, g, unknown, or other
  misc_difference 207: note = a, c, u, g, unknown, or other
  misc_difference 211: note = a, c, u, g, unknown, or other
  misc_difference 212: note = a, c, u, g, unknown, or other
  misc_difference 213: note = a, c, u, g, unknown, or other
  misc_difference 214: note = a, c, u, g, unknown, or other
  misc_difference 215: note = a, c, u, g, unknown, or other
  misc_difference 216: note = a, c, u, g, unknown, or other
  misc_difference 219: note = a, c, u, g, unknown, or other
nnnyryynnrrnyyrynnnrrynnnnnnryrnratgrnannrcngrtyrrnnngnnnynnnnnnarccygnnnnnnnnnnnrrnnyynnnrnncrnnnnnnnnrtnrggnnnnnrnnngcgrrtnycatnrnggncngnrrnnnnnnnnnnyncnnnanagnccgranrnannnnygcrrycnnncyynyyryyrnnrynnnnyyynryrnnnnnnrrn

SEQ ID NO: 795545 - RNA, 188 nt, unidentified
  source 1..188: mol_type = unassigned RNA; note = 2767cc
  misc_difference 2: note = a, c, u, g, unknown, or other
  misc_difference 3: note = a, c, u, g, unknown, or other
  misc_difference 4: note = a, c, u, g, unknown, or other
  misc_difference 5: note = a, c, u, g, unknown, or other
  misc_difference 6: note = a, c, u, g, unknown, or other
  misc_difference 7: note = a, c, u, g, unknown, or other
  misc_difference 8: note = a, c, u, g, unknown, or other
  misc_difference 9: note = a, c, u, g, unknown, or other
  misc_difference 10: note = a, c, u, g, unknown, or other
  misc_difference 11: note = a, c, u, g, unknown, or other
  misc_difference 12: note = a, c, u, g, unknown, or other
  misc_difference 14: note = a, c, u, g, unknown, or other
  misc_difference 16: note = a, c, u, g, unknown, or other
  misc_difference 22: note = a, c, u, g, unknown, or other
  misc_difference 23: note = a, c, u, g, unknown, or other
  misc_difference 24: note = a, c, u, g, unknown, or other
  misc_difference 25: note = a, c, u, g, unknown, or other
  misc_difference 26: note = a, c, u, g, unknown, or other
  misc_difference 30: note = a, c, u, g, unknown, or other
  misc_difference 33: note = a, c, u, g, unknown, or other
  misc_difference 34: note = a, c, u, g, unknown, or other
  misc_difference 35: note = a, c, u, g, unknown, or other
  misc_difference 37: note = a, c, u, g, unknown, or other
  misc_difference 38: note = a, c, u, g, unknown, or other
  misc_difference 39: note = a, c, u, g, unknown, or other
  misc_difference 40: note = a, c, u, g, unknown, or other
  misc_difference 41: note = a, c, u, g, unknown, or other
  misc_difference 42: note = a, c, u, g, unknown, or other
  misc_difference 43: note = a, c, u, g, unknown, or other
  misc_difference 45: note = a, c, u, g, unknown, or other
  misc_difference 47: note = a, c, u, g, unknown, or other
  misc_difference 49: note = a, c, u, g, unknown, or other
  misc_difference 50: note = a, c, u, g, unknown, or other
  misc_difference 51: note = a, c, u, g, unknown, or other
  misc_difference 52: note = a, c, u, g, unknown, or other
  misc_difference 54: note = a, c, u, g, unknown, or other
  misc_difference 55: note = a, c, u, g, unknown, or other
  misc_difference 59: note = a, c, u, g, unknown, or other
  misc_difference 60: note = a, c, u, g, unknown, or other
  misc_difference 61: note = a, c, u, g, unknown, or other
  misc_difference 62: note = a, c, u, g, unknown, or other
  misc_difference 63: note = a, c, u, g, unknown, or other
  misc_difference 64: note = a, c, u, g, unknown, or other
  misc_difference 68: note = a, c, u, g, unknown, or other
  misc_difference 72: note = a, c, u, g, unknown, or other
  misc_difference 76: note = a, c, u, g, unknown, or other
  misc_difference 77: note = a, c, u, g, unknown, or other
  misc_difference 79: note = a, c, u, g, unknown, or other
  misc_difference 83: note = a, c, u, g, unknown, or other
  misc_difference 84: note = a, c, u, g, unknown, or other
  misc_difference 85: note = a, c, u, g, unknown, or other
  misc_difference 89: note = a, c, u, g, unknown, or other
  misc_difference 93: note = a, c, u, g, unknown, or other
  misc_difference 95: note = a, c, u, g, unknown, or other
  misc_difference 96: note = a, c, u, g, unknown, or other
  misc_difference 97: note = a, c, u, g, unknown, or other
  misc_difference 98: note = a, c, u, g, unknown, or other
  misc_difference 99: note = a, c, u, g, unknown, or other
  misc_difference 100: note = a, c, u, g, unknown, or other
  misc_difference 101: note = a, c, u, g, unknown, or other
  misc_difference 103: note = a, c, u, g, unknown, or other
  misc_difference 105: note = a, c, u, g, unknown, or other
  misc_difference 106: note = a, c, u, g, unknown, or other
  misc_difference 108: note = a, c, u, g, unknown, or other
  misc_difference 109: note = a, c, u, g, unknown, or other
  misc_difference 111: note = a, c, u, g, unknown, or other
  misc_difference 112: note = a, c, u, g, unknown, or other
  misc_difference 113: note = a, c, u, g, unknown, or other
  misc_difference 114: note = a, c, u, g, unknown, or other
  misc_difference 116: note = a, c, u, g, unknown, or other
  misc_difference 118: note = a, c, u, g, unknown, or other
  misc_difference 119: note = a, c, u, g, unknown, or other
  misc_difference 123: note = a, c, u, g, unknown, or other
  misc_difference 124: note = a, c, u, g, unknown, or other
  misc_difference 125: note = a, c, u, g, unknown, or other
  misc_difference 127: note = a, c, u, g, unknown, or other
  misc_difference 128: note = a, c, u, g, unknown, or other
  misc_difference 129: note = a, c, u, g, unknown, or other
  misc_difference 130: note = a, c, u, g, unknown, or other
  misc_difference 131: note = a, c, u, g, unknown, or other
  misc_difference 132: note = a, c, u, g, unknown, or other
  misc_difference 134: note = a, c, u, g, unknown, or other
  misc_difference 135: note = a, c, u, g, unknown, or other
  misc_difference 136: note = a, c, u, g, unknown, or other
  misc_difference 137: note = a, c, u, g, unknown, or other
  misc_difference 138: note = a, c, u, g, unknown, or other
  misc_difference 141: note = a, c, u, g, unknown, or other
  misc_difference 142: note = a, c, u, g, unknown, or other
  misc_difference 143: note = a, c, u, g, unknown, or other
  misc_difference 145: note = a, c, u, g, unknown, or other
  misc_difference 146: note = a, c, u, g, unknown, or other
  misc_difference 147: note = a, c, u, g, unknown, or other
  misc_difference 148: note = a, c, u, g, unknown, or other
  misc_difference 152: note = a, c, u, g, unknown, or other
  misc_difference 154: note = a, c, u, g, unknown, or other
  misc_difference 155: note = a, c, u, g, unknown, or other
  misc_difference 156: note = a, c, u, g, unknown, or other
  misc_difference 157: note = a, c, u, g, unknown, or other
  misc_difference 158: note = a, c, u, g, unknown, or other
  misc_difference 159: note = a, c, u, g, unknown, or other
  misc_difference 161: note = a, c, u, g, unknown, or other
  misc_difference 162: note = a, c, u, g, unknown, or other
  misc_difference 166: note = a, c, u, g, unknown, or other
  misc_difference 167: note = a, c, u, g, unknown, or other
  misc_difference 168: note = a, c, u, g, unknown, or other
  misc_difference 170: note = a, c, u, g, unknown, or other
  misc_difference 172: note = a, c, u, g, unknown, or other
  misc_difference 174: note = a, c, u, g, unknown, or other
  misc_difference 175: note = a, c, u, g, unknown, or other
  misc_difference 176: note = a, c, u, g, unknown, or other
  misc_difference 177: note = a, c, u, g, unknown, or other
  misc_difference 178: note = a, c, u, g, unknown, or other
  misc_difference 181: note = a, c, u, g, unknown, or other
  misc_difference 183: note = a, c, u, g, unknown, or other
  misc_difference 187: note = a, c, u, g, unknown, or other
  misc_difference 188: note = a, c, u, g, unknown, or other
tnnnnnnnnnnnrngnrgcrgnnnnnrarnyynnnynnnnnnnrnynrnnnnannyygnnnnnnaryntrrnyyrnnrnryynnnyygnrcyncnnnnnnnynynnynnrnnnnrnrnnrarnnnrnnnnnnynnnnnygnnnynnnncrgnynnnnnnrnngcynnnynynynnnnnrrnrngrrnn

SEQ ID NO: 795546 - RNA, 201 nt, unidentified
  source 1..201: mol_type = unassigned RNA; note = 0bb0ad
  misc_difference 1: note = a, c, u, g, unknown, or other
  misc_difference 4: note = a, c, u, g, unknown, or other
  misc_difference 8: note = a, c, u, g, unknown, or other
  misc_difference 9: note = a, c, u, g, unknown, or other
  misc_difference 10: note = a, c, u, g, unknown, or other
  misc_difference 14: note = a, c, u, g, unknown, or other
  misc_difference 15: note = a, c, u, g, unknown, or other
  misc_difference 16: note = a, c, u, g, unknown, or other
  misc_difference 17: note = a, c, u, g, unknown, or other
  misc_difference 18: note = a, c, u, g, unknown, or other
  misc_difference 19: note = a, c, u, g, unknown, or other
  misc_difference 23: note = a, c, u, g, unknown, or other
  misc_difference 24: note = a, c, u, g, unknown, or other
  misc_difference 25: note = a, c, u, g, unknown, or other
  misc_difference 26: note = a, c, u, g, unknown, or other
  misc_difference 27: note = a, c, u, g, unknown, or other
  misc_difference 31: note = a, c, u, g, unknown, or other
  misc_difference 32: note = a, c, u, g, unknown, or other
  misc_difference 34: note = a, c, u, g, unknown, or other
  misc_difference 35: note = a, c, u, g, unknown, or other
  misc_difference 41: note = a, c, u, g, unknown, or other
  misc_difference 43: note = a, c, u, g, unknown, or other
  misc_difference 45: note = a, c, u, g, unknown, or other
  misc_difference 46: note = a, c, u, g, unknown, or other
  misc_difference 49: note = a, c, u, g, unknown, or other
  misc_difference 52: note = a, c, u, g, unknown, or other
  misc_difference 53: note = a, c, u, g, unknown, or other
  misc_difference 54: note = a, c, u, g, unknown, or other
  misc_difference 55: note = a, c, u, g, unknown, or other
  misc_difference 59: note = a, c, u, g, unknown, or other
  misc_difference 64: note = a, c, u, g, unknown, or other
  misc_difference 66: note = a, c, u, g, unknown, or other
  misc_difference 68: note = a, c, u, g, unknown, or other
  misc_difference 71: note = a, c, u, g, unknown, or other
  misc_difference 84: note = a, c, u, g, unknown, or other
  misc_difference 94: note = a, c, u, g, unknown, or other
  misc_difference 97: note = a, c, u, g, unknown, or other
  misc_difference 100: note = a, c, u, g, unknown, or other
  misc_difference 101: note = a, c, u, g, unknown, or other
  misc_difference 102: note = a, c, u, g, unknown, or other
  misc_difference 111: note = a, c, u, g, unknown, or other
  misc_difference 112: note = a, c, u, g, unknown, or other
  misc_difference 113: note = a, c, u, g, unknown, or other
  misc_difference 114: note = a, c, u, g, unknown, or other
  misc_difference 115: note = a, c, u, g, unknown, or other
  misc_difference 116: note = a, c, u, g, unknown, or other
  misc_difference 122: note = a, c, u, g, unknown, or other
  misc_difference 123: note = a, c, u, g, unknown, or other
  misc_difference 124: note = a, c, u, g, unknown, or other
  misc_difference 125: note = a, c, u, g, unknown, or other
  misc_difference 126: note = a, c, u, g, unknown, or other
  misc_difference 127: note = a, c, u, g, unknown, or other
  misc_difference 128: note = a, c, u, g, unknown, or other
  misc_difference 129: note = a, c, u, g, unknown, or other
  misc_difference 133: note = a, c, u, g, unknown, or other
  misc_difference 138: note = a, c, u, g, unknown, or other
  misc_difference 139: note = a, c, u, g, unknown, or other
  misc_difference 147: note = a, c, u, g, unknown, or other
  misc_difference 148: note = a, c, u, g, unknown, or other
  misc_difference 150: note = a, c, u, g, unknown, or other
  misc_difference 152: note = a, c, u, g, unknown, or other
  misc_difference 153: note = a, c, u, g, unknown, or other
  misc_difference 155: note = a, c, u, g, unknown, or other
  misc_difference 157: note = a, c, u, g, unknown, or other
  misc_difference 159: note = a, c, u, g, unknown, or other
  misc_difference 162: note = a, c, u, g, unknown, or other
  misc_difference 163: note = a, c, u, g, unknown, or other
  misc_difference 164: note = a, c, u, g, unknown, or other
  misc_difference 165: note = a, c, u, g, unknown, or other
  misc_difference 166: note = a, c, u, g, unknown, or other
  misc_difference 167: note = a, c, u, g, unknown, or other
  misc_difference 168: note = a, c, u, g, unknown, or other
  misc_difference 170: note = a, c, u, g, unknown, or other
  misc_difference 172: note = a, c, u, g, unknown, or other
  misc_difference 173: note = a, c, u, g, unknown, or other
  misc_difference 174: note = a, c, u, g, unknown, or other
  misc_difference 175: note = a, c, u, g, unknown, or other
  misc_difference 176: note = a, c, u, g, unknown, or other
  misc_difference 177: note = a, c, u, g, unknown, or other
  misc_difference 178: note = a, c, u, g, unknown, or other
  misc_difference 179: note = a, c, u, g, unknown, or other
  misc_difference 180: note = a, c, u, g, unknown, or other
  misc_difference 181: note = a, c, u, g, unknown, or other
  misc_difference 182: note = a, c, u, g, unknown, or other
  misc_difference 183: note = a, c, u, g, unknown, or other
  misc_difference 184: note = a, c, u, g, unknown, or other
  misc_difference 186: note = a, c, u, g, unknown, or other
  misc_difference 187: note = a, c, u, g, unknown, or other
  misc_difference 188: note = a, c, u, g, unknown, or other
  misc_difference 190: note = a, c, u, g, unknown, or other
  misc_difference 191: note = a, c, u, g, unknown, or other
  misc_difference 192: note = a, c, u, g, unknown, or other
  misc_difference 194: note = a, c, u, g, unknown, or other
  misc_difference 195: note = a, c, u, g, unknown, or other
  misc_difference 197: note = a, c, u, g, unknown, or other
  misc_difference 198: note = a, c, u, g, unknown, or other
  misc_difference 199: note = a, c, u, g, unknown, or other
  misc_difference 200: note = a, c, u, g, unknown, or other
  misc_difference 201: note = a, c, u, g, unknown, or other
ncrnygrnnngcgnnnnnnycrnnnnnggcnnrnnyrcgrncngnnrcngcnnnnyrgnyrtgncncnygncgrcgcrryctrnyytgccgcyngcncgnnnyrgyyryynnnnnnggcgcnnnnnnnngycngcyrnnyrrcggcnncnrnncngncngcnnnnnnnrncnnnnnnnnnnnnnrnnnynnnynnynnnnn

SEQ ID NO: 795547 - RNA, 263 nt, unidentified
  source 1..263: mol_type = unassigned RNA; note = 004f7a
  misc_difference 1: note = a, c, u, g, unknown, or other
  misc_difference 4: note = a, c, u, g, unknown, or other
  misc_difference 6: note = a, c, u, g, unknown, or other
  misc_difference 7: note = a, c, u, g, unknown, or other
  misc_difference 12: note = a, c, u, g, unknown, or other
  misc_difference 14: note = a, c, u, g, unknown, or other
  misc_difference 16: note = a, c, u, g, unknown, or other
  misc_difference 17: note = a, c, u, g, unknown, or other
  misc_difference 18: note = a, c, u, g, unknown, or other
  misc_difference 19: note = a, c, u, g, unknown, or other
  misc_difference 20: note = a, c, u, g, unknown, or other
  misc_difference 22: note = a, c, u, g, unknown, or other
  misc_difference 26: note = a, c, u, g, unknown, or other
  misc_difference 28: note = a, c, u, g, unknown, or other
  misc_difference 30: note = a, c, u, g, unknown, or other
  misc_difference 38: note = a, c, u, g, unknown, or other
  misc_difference 53: note = a, c, u, g, unknown, or other
  misc_difference 54: note = a, c, u, g, unknown, or other
  misc_difference 55: note = a, c, u, g, unknown, or other
  misc_difference 56: note = a, c, u, g, unknown, or other
  misc_difference 57: note = a, c, u, g, unknown, or other
  misc_difference 58: note = a, c, u, g, unknown, or other
  misc_difference 71: note = a, c, u, g, unknown, or other
  misc_difference 72: note = a, c, u, g, unknown, or other
  misc_difference 73: note = a, c, u, g, unknown, or other
  misc_difference 74: note = a, c, u, g, unknown, or other
  misc_difference 75: note = a, c, u, g, unknown, or other
  misc_difference 76: note = a, c, u, g, unknown, or other
  misc_difference 77: note = a, c, u, g, unknown, or other
  misc_difference 78: note = a, c, u, g, unknown, or other
  misc_difference 79: note = a, c, u, g, unknown, or other
  misc_difference 80: note = a, c, u, g, unknown, or other
  misc_difference 81: note = a, c, u, g, unknown, or other
  misc_difference 83: note = a, c, u, g, unknown, or other
  misc_difference 85: note = a, c, u, g, unknown, or other
  misc_difference 86: note = a, c, u, g, unknown, or other
  misc_difference 90: note = a, c, u, g, unknown, or other
  misc_difference 98: note = a, c, u, g, unknown, or other
  misc_difference 99: note = a, c, u, g, unknown, or other
  misc_difference 100: note = a, c, u, g, unknown, or other
  misc_difference 101: note = a, c, u, g, unknown, or other
  misc_difference 107: note = a, c, u, g, unknown, or other
  misc_difference 108: note = a, c, u, g, unknown, or other
  misc_difference 109: note = a, c, u, g, unknown, or other
  misc_difference 114: note = a, c, u, g, unknown, or other
  misc_difference 115: note = a, c, u, g, unknown, or other
  misc_difference 116: note = a, c, u, g, unknown, or other
  misc_difference 122: note = a, c, u, g, unknown, or other
  misc_difference 129: note = a, c, u, g, unknown, or other
  misc_difference 131: note = a, c, u, g, unknown, or other
  misc_difference 132: note = a, c, u, g, unknown, or other
  misc_difference 133: note = a, c, u, g, unknown, or other
  misc_difference 146: note = a, c, u, g, unknown, or other
  misc_difference 160: note = a, c, u, g, unknown, or other
  misc_difference 164: note = a, c, u, g, unknown, or other
  misc_difference 165: note = a, c, u, g, unknown, or other
  misc_difference 166: note = a, c, u, g, unknown, or other
  misc_difference 171: note = a, c, u, g, unknown, or other
  misc_difference 180: note = a, c, u, g, unknown, or other
  misc_difference 182: note = a, c, u, g, unknown, or other
  misc_difference 183: note = a, c, u, g, unknown, or other
  misc_difference 193: note = a, c, u, g, unknown, or other
  misc_difference 195: note = a, c, u, g, unknown, or other
  misc_difference 196: note = a, c, u, g, unknown, or other
  misc_difference 199: note = a, c, u, g, unknown, or other
  misc_difference 200: note = a, c, u, g, unknown, or other
  misc_difference 201: note = a, c, u, g, unknown, or other
  misc_difference 202: note = a, c, u, g, unknown, or other
  misc_difference 203: note = a, c, u, g, unknown, or other
  misc_difference 204: note = a, c, u, g, unknown, or other
  misc_difference 205: note = a, c, u, g, unknown, or other
  misc_difference 206: note = a, c, u, g, unknown, or other
  misc_difference 207: note = a, c, u, g, unknown, or other
  misc_difference 208: note = a, c, u, g, unknown, or other
  misc_difference 211: note = a, c, u, g, unknown, or other
  misc_difference 216: note = a, c, u, g, unknown, or other
  misc_difference 217: note = a, c, u, g, unknown, or other
  misc_difference 218: note = a, c, u, g, unknown, or other
  misc_difference 219: note = a, c, u, g, unknown, or other
  misc_difference 221: note = a, c, u, g, unknown, or other
  misc_difference 223: note = a, c, u, g, unknown, or other
  misc_difference 230: note = a, c, u, g, unknown, or other
  misc_difference 231: note = a, c, u, g, unknown, or other
  misc_difference 233: note = a, c, u, g, unknown, or other
  misc_difference 234: note = a, c, u, g, unknown, or other
  misc_difference 235: note = a, c, u, g, unknown, or other
  misc_difference 238: note = a, c, u, g, unknown, or other
  misc_difference 239: note = a, c, u, g, unknown, or other
  misc_difference 240: note = a, c, u, g, unknown, or other
  misc_difference 241: note = a, c, u, g, unknown, or other
  misc_difference 243: note = a, c, u, g, unknown, or other
  misc_difference 245: note = a, c, u, g, unknown, or other
  misc_difference 246: note = a, c, u, g, unknown, or other
  misc_difference 247: note = a, c, u, g, unknown, or other
  misc_difference 249: note = a, c, u, g, unknown, or other
  misc_difference 250: note = a, c, u, g, unknown, or other
  misc_difference 255: note = a, c, u, g, unknown, or other
  misc_difference 261: note = a, c, u, g, unknown, or other
  misc_difference 262: note = a, c, u, g, unknown, or other
  misc_difference 263: note = a, c, u, g, unknown, or other
nrrnynnccrrnynrnnnnnrnyrrngnyngcagcgynyggrryrayycgcgnnnnnncyatgrgcrryynnnnnnnnnnnynrnnrrynrcgcycgnnnnctagannngcgrnnnryyycnrccgranrnnncgtcctgcggtrnccarcccgcgyryntcannnygacnrcgcgtcgnynnygacacgcynrnnrynnnnnnnnnnyrncyggnnnnyngnrgcrrynncnnnrynnnnrnynnngnnrycgnytcrynnn

SEQ ID NO: 795548 - RNA, 182 nt, unidentified
  source 1..182: mol_type = unassigned RNA; note = 376c4b
  misc_difference 1: note = a, c, u, g, unknown, or other
  misc_difference 2: note = a, c, u, g, unknown, or other
  misc_difference 3: note = a, c, u, g, unknown, or other
  misc_difference 5: note = a, c, u, g, unknown, or other
  misc_difference 6: note = a, c, u, g, unknown, or other
  misc_difference 7: note = a, c, u, g, unknown, or other
  misc_difference 8: note = a, c, u, g, unknown, or other
  misc_difference 9: note = a, c, u, g, unknown, or other
  misc_difference 10: note = a, c, u, g, unknown, or other
  misc_difference 11: note = a, c, u, g, unknown, or other
  misc_difference 12: note = a, c, u, g, unknown, or other
  misc_difference 13: note = a, c, u, g, unknown, or other
  misc_difference 15: note = a, c, u, g, unknown, or other
  misc_difference 16: note = a, c, u, g, unknown, or other
  misc_difference 17: note = a, c, u, g, unknown, or other
  misc_difference 18: note = a, c, u, g, unknown, or other
  misc_difference 19: note = a, c, u, g, unknown, or other
  misc_difference 21: note = a, c, u, g, unknown, or other
  misc_difference 22: note = a, c, u, g, unknown, or other
  misc_difference 23: note = a, c, u, g, unknown, or other
  misc_difference 24: note = a, c, u, g, unknown, or other
  misc_difference 25: note = a, c, u, g, unknown, or other
  misc_difference 26: note = a, c, u, g, unknown, or other
  misc_difference 27: note = a, c, u, g, unknown, or other
  misc_difference 28: note = a, c, u, g, unknown, or other
  misc_difference 29: note = a, c, u, g, unknown, or other
  misc_difference 30: note = a, c, u, g, unknown, or other
  misc_difference 31: note = a, c, u, g, unknown, or other
  misc_difference 32: note = a, c, u, g, unknown, or other
  misc_difference 33: note = a, c, u, g, unknown, or other
  misc_difference 34: note = a, c, u, g, unknown, or other
  misc_difference 35: note = a, c, u, g, unknown, or other
  misc_difference 36: note = a, c, u, g, unknown, or other
  misc_difference 37: note = a, c, u, g, unknown, or other
  misc_difference 38: note = a, c, u, g, unknown, or other
  misc_difference 39: note = a, c, u, g, unknown, or other
  misc_difference 40: note = a, c, u, g, unknown, or other
  misc_difference 41: note = a, c, u, g, unknown, or other
  misc_difference 42: note = a, c, u, g, unknown, or other
  misc_difference 43: note = a, c, u, g, unknown, or other
  misc_difference 44: note = a, c, u, g, unknown, or other
  misc_difference 45: note = a, c, u, g, unknown, or other
  misc_difference 46: note = a, c, u, g, unknown, or other
  misc_difference 47: note = a, c, u, g, unknown, or other
  misc_difference 48: note = a, c, u, g, unknown, or other
  misc_difference 49: note = a, c, u, g, unknown, or other
  misc_difference 50: note = a, c, u, g, unknown, or other
  misc_difference 51: note = a, c, u, g, unknown, or other
  misc_difference 52: note = a, c, u, g, unknown, or other
  misc_difference 53: note = a, c, u, g, unknown, or other
  misc_difference 55: note = a, c, u, g, unknown, or other
  misc_difference 57: note = a, c, u, g, unknown, or other
  misc_difference 62: note = a, c, u, g, unknown, or other
  misc_difference 69: note = a, c, u, g, unknown, or other
  misc_difference 71: note = a, c, u, g, unknown, or other
  misc_difference 72: note = a, c, u, g, unknown, or other
  misc_difference 73: note = a, c, u, g, unknown, or other
  misc_difference 74: note = a, c, u, g, unknown, or other
  misc_difference 75: note = a, c, u, g, unknown, or other
  misc_difference 76: note = a, c, u, g, unknown, or other
  misc_difference 78: note = a, c, u, g, unknown, or other
  misc_difference 83: note = a, c, u, g, unknown, or other
  misc_difference 84: note = a, c, u, g, unknown, or other
  misc_difference 85: note = a, c, u, g, unknown, or other
  misc_difference 86: note = a, c, u, g, unknown, or other
  misc_difference 87: note = a, c, u, g, unknown, or other
  misc_difference 91: note = a, c, u, g, unknown, or other
  misc_difference 96: note = a, c, u, g, unknown, or other
  misc_difference 97: note = a, c, u, g, unknown, or other
  misc_difference 98: note = a, c, u, g, unknown, or other
  misc_difference 99: note = a, c, u, g, unknown, or other
  misc_difference 100: note = a, c, u, g, unknown, or other
  misc_difference 104: note = a, c, u, g, unknown, or other
  misc_difference 105: note = a, c, u, g, unknown, or other
  misc_difference 115: note = a, c, u, g, unknown, or other
  misc_difference 117: note = a, c, u, g, unknown, or other
  misc_difference 119: note = a, c, u, g, unknown, or other
  misc_difference 120: note = a, c, u, g, unknown, or other
  misc_difference 121: note = a, c, u, g, unknown, or other
  misc_difference 124: note = a, c, u, g, unknown, or other
  misc_difference 125: note = a, c, u, g, unknown, or other
  misc_difference 126: note = a, c, u, g, unknown, or other
  misc_difference 127: note = a, c, u, g, unknown, or other
  misc_difference 128: note = a, c, u, g, unknown, or other
  misc_difference 129: note = a, c, u, g, unknown, or other
  misc_difference 144: note = a, c, u, g, unknown, or other
  misc_difference 145: note = a, c, u, g, unknown, or other
  misc_difference 146: note = a, c, u, g, unknown, or other
  misc_difference 149: note = a, c, u, g, unknown, or other
  misc_difference 151: note = a, c, u, g, unknown, or other
  misc_difference 152: note = a, c, u, g, unknown, or other
  misc_difference 153: note = a, c, u, g, unknown, or other
  misc_difference 154: note = a, c, u, g, unknown, or other
  misc_difference 158: note = a, c, u, g, unknown, or other
  misc_difference 162: note = a, c, u, g, unknown, or other
  misc_difference 165: note = a, c, u, g, unknown, or other
  misc_difference 166: note = a, c, u, g, unknown, or other
  misc_difference 169: note = a, c, u, g, unknown, or other
  misc_difference 172: note = a, c, u, g, unknown, or other
  misc_difference 173: note = a, c, u, g, unknown, or other
  misc_difference 174: note = a, c, u, g, unknown, or other
  misc_difference 178: note = a, c, u, g, unknown, or other
  misc_difference 179: note = a, c, u, g, unknown, or other
  misc_difference 180: note = a, c, u, g, unknown, or other
  misc_difference 181: note = a, c, u, g, unknown, or other
  misc_difference 182: note = a, c, u, g, unknown, or other
nnnynnnnnnnnnynnnnnynnnnnnnnnnnnnnnnnnnnnnnnnnnnnnnnnrnrnryrrnagrycgnynnnnnnynggyynnnnnrarnccgynnnnnagcnngrycryyrynynynnnyynnnnnnarcycgaacagtygnnngrncnnnnragnycgnatnnrcnagnnngggnnnnn

SEQ ID NO: 795549 - RNA, 286 nt, unidentified
  source 1..286: mol_type = unassigned RNA; note = 529f78
  misc_difference 1: note = a, c, u, g, unknown, or other
  misc_difference 2: note = a, c, u, g, unknown, or other
  misc_difference 3: note = a, c, u, g, unknown, or other
  misc_difference 4: note = a, c, u, g, unknown, or other
  misc_difference 5: note = a, c, u, g, unknown, or other
  misc_difference 6: note = a, c, u, g, unknown, or other
  misc_difference 8: note = a, c, u, g, unknown, or other
  misc_difference 9: note = a, c, u, g, unknown, or other
  misc_difference 11: note = a, c, u, g, unknown, or other
  misc_difference 12: note = a, c, u, g, unknown, or other
  misc_difference 13: note = a, c, u, g, unknown, or other
  misc_difference 14: note = a, c, u, g, unknown, or other
  misc_difference 15: note = a, c, u, g, unknown, or other
  misc_difference 16: note = a, c, u, g, unknown, or other
  misc_difference 17: note = a, c, u, g, unknown, or other
  misc_difference 18: note = a, c, u, g, unknown, or other
  misc_difference 19: note = a, c, u, g, unknown, or other
  misc_difference 20: note = a, c, u, g, unknown, or other
  misc_difference 23: note = a, c, u, g, unknown, or other
  misc_difference 24: note = a, c, u, g, unknown, or other
  misc_difference 27: note = a, c, u, g, unknown, or other
  misc_difference 29: note = a, c, u, g, unknown, or other
  misc_difference 31: note = a, c, u, g, unknown, or other
  misc_difference 32: note = a, c, u, g, unknown, or other
  misc_difference 33: note = a, c, u, g, unknown, or other
  misc_difference 34: note = a, c, u, g, unknown, or other
  misc_difference 35: note = a, c, u, g, unknown, or other
  misc_difference 36: note = a, c, u, g, unknown, or other
  misc_difference 37: note = a, c, u, g, unknown, or other
  misc_difference 39: note = a, c, u, g, unknown, or other
  misc_difference 40: note = a, c, u, g, unknown, or other
  misc_difference 41: note = a, c, u, g, unknown, or other
  misc_difference 42: note = a, c, u, g, unknown, or other
  misc_difference 43: note = a, c, u, g, unknown, or other
  misc_difference 44: note = a, c, u, g, unknown, or other
  misc_difference 45: note = a, c, u, g, unknown, or other
  misc_difference 46: note = a, c, u, g, unknown, or other
  misc_difference 47: note = a, c, u, g, unknown, or other
  misc_difference 50: note = a, c, u, g, unknown, or other
  misc_difference 51: note = a, c, u, g, unknown, or other
  misc_difference 52: note = a, c, u, g, unknown, or other
  misc_difference 57: note = a, c, u, g, unknown, or other
  misc_difference 58: note = a, c, u, g, unknown, or other
  misc_difference 59: note = a, c, u, g, unknown, or other
  misc_difference 60: note = a, c, u, g, unknown, or other
  misc_difference 61: note = a, c, u, g, unknown, or other
  misc_difference 63: note = a, c, u, g, unknown, or other
  misc_difference 66: note = a, c, u, g, unknown, or other
  misc_difference 67: note = a, c, u, g, unknown, or other
  misc_difference 71: note = a, c, u, g, unknown, or other
  misc_difference 81: note = a, c, u, g, unknown, or other
  misc_difference 82: note = a, c, u, g, unknown, or other
  misc_difference 83: note = a, c, u, g, unknown, or other
  misc_difference 86: note = a, c, u, g, unknown, or other
  misc_difference 88: note = a, c, u, g, unknown, or other
  misc_difference 90: note = a, c, u, g, unknown, or other
  misc_difference 92: note = a, c, u, g, unknown, or other
  misc_difference 96: note = a, c, u, g, unknown, or other
  misc_difference 97: note = a, c, u, g, unknown, or other
  misc_difference 98: note = a, c, u, g, unknown, or other
  misc_difference 99: note = a, c, u, g, unknown, or other
  misc_difference 100: note = a, c, u, g, unknown, or other
  misc_difference 101: note = a, c, u, g, unknown, or other
  misc_difference 102: note = a, c, u, g, unknown, or other
  misc_difference 103: note = a, c, u, g, unknown, or other
  misc_difference 104: note = a, c, u, g, unknown, or other
  misc_difference 105: note = a, c, u, g, unknown, or other
  misc_difference 106: note = a, c, u, g, unknown, or other
  misc_difference 108: note = a, c, u, g, unknown, or other
  misc_difference 116: note = a, c, u, g, unknown, or other
  misc_difference 117: note = a, c, u, g, unknown, or other
  misc_difference 118: note = a, c, u, g, unknown, or other
  misc_difference 119: note = a, c, u, g, unknown, or other
  misc_difference 120: note = a, c, u, g, unknown, or other
  misc_difference 121: note = a, c, u, g, unknown, or other
  misc_difference 139: note = a, c, u, g, unknown, or other
  misc_difference 140: note = a, c, u, g, unknown, or other
  misc_difference 141: note = a, c, u, g, unknown, or other
  misc_difference 142: note = a, c, u, g, unknown, or other
  misc_difference 143: note = a, c, u, g, unknown, or other
  misc_difference 144: note = a, c, u, g, unknown, or other
  misc_difference 155: note = a, c, u, g, unknown, or other
  misc_difference 156: note = a, c, u, g, unknown, or other
  misc_difference 157: note = a, c, u, g, unknown, or other
  misc_difference 174: note = a, c, u, g, unknown, or other
  misc_difference 175: note = a, c, u, g, unknown, or other
  misc_difference 176: note = a, c, u, g, unknown, or other
  misc_difference 177: note = a, c, u, g, unknown, or other
  misc_difference 178: note = a, c, u, g, unknown, or other
  misc_difference 188: note = a, c, u, g, unknown, or other
  misc_difference 198: note = a, c, u, g, unknown, or other
  misc_difference 200: note = a, c, u, g, unknown, or other
  misc_difference 207: note = a, c, u, g, unknown, or other
  misc_difference 208: note = a, c, u, g, unknown, or other
  misc_difference 209: note = a, c, u, g, unknown, or other
  misc_difference 210: note = a, c, u, g, unknown, or other
  misc_difference 212: note = a, c, u, g, unknown, or other
  misc_difference 213: note = a, c, u, g, unknown, or other
  misc_difference 214: note = a, c, u, g, unknown, or other
  misc_difference 215: note = a, c, u, g, unknown, or other
  misc_difference 225: note = a, c, u, g, unknown, or other
  misc_difference 226: note = a, c, u, g, unknown, or other
  misc_difference 227: note = a, c, u, g, unknown, or other
  misc_difference 228: note = a, c, u, g, unknown, or other
  misc_difference 231: note = a, c, u, g, unknown, or other
  misc_difference 236: note = a, c, u, g, unknown, or other
  misc_difference 237: note = a, c, u, g, unknown, or other
  misc_difference 238: note = a, c, u, g, unknown, or other
  misc_difference 244: note = a, c, u, g, unknown, or other
  misc_difference 245: note = a, c, u, g, unknown, or other
  misc_difference 246: note = a, c, u, g, unknown, or other
  misc_difference 248: note = a, c, u, g, unknown, or other
  misc_difference 249: note = a, c, u, g, unknown, or other
  misc_difference 250: note = a, c, u, g, unknown, or other
  misc_difference 251: note = a, c, u, g, unknown, or other
  misc_difference 253: note = a, c, u, g, unknown, or other
  misc_difference 254: note = a, c, u, g, unknown, or other
  misc_difference 255: note = a, c, u, g, unknown, or other
  misc_difference 256: note = a, c, u, g, unknown, or other
  misc_difference 257: note = a, c, u, g, unknown, or other
  misc_difference 261: note = a, c, u, g, unknown, or other
  misc_difference 263: note = a, c, u, g, unknown, or other
  misc_difference 264: note = a, c, u, g, unknown, or other
  misc_difference 265: note = a, c, u, g, unknown, or other
  misc_difference 266: note = a, c, u, g, unknown, or other
  misc_difference 267: note = a, c, u, g, unknown, or other
  misc_difference 268: note = a, c, u, g, unknown, or other
  misc_difference 269: note = a, c, u, g, unknown, or other
  misc_difference 270: note = a, c, u, g, unknown, or other
  misc_difference 271: note = a, c, u, g, unknown, or other
  misc_difference 272: note = a, c, u, g, unknown, or other
  misc_difference 274: note = a, c, u, g, unknown, or other
  misc_difference 276: note = a, c, u, g, unknown, or other
  misc_difference 277: note = a, c, u, g, unknown, or other
  misc_difference 278: note = a, c, u, g, unknown, or other
  misc_difference 279: note = a, c, u, g, unknown, or other
  misc_difference 280: note = a, c, u, g, unknown, or other
  misc_difference 283: note = a, c, u, g, unknown, or other
  misc_difference 285: note = a, c, u, g, unknown, or other
  misc_difference 286: note = a, c, u, g, unknown, or other
nnnnnnrnnynnnnnnnnnnrynnrrnynrnnnnnnnrnnnnnnnnnrrnnnryyrnnnnngnrynnrygnyggagttccnnnrrngncnyngrcnnnnnnnnnnnrnragyyccnnnnnnrtgaatgracccgyyrynnnnnnygctacgcycnnnratctycatgraccycnnnnngrgagtyccnrataggtgyntnggcgacnnnnynnnngryygccyrnnnnygnrgaynnnryrrynnnynnnnynnnnnrrynrnnnnnnnnnnrnynnnnnycnrnn

SEQ ID NO: 795550 - RNA, 226 nt, unidentified
  source 1..226: mol_type = unassigned RNA; note = 09691c
  misc_difference 1: note = a, c, u, g, unknown, or other
  misc_difference 2: note = a, c, u, g, unknown, or other
  misc_difference 3: note = a, c, u, g, unknown, or other
  misc_difference 4: note = a, c, u, g, unknown, or other
  misc_difference 5: note = a, c, u, g, unknown, or other
  misc_difference 6: note = a, c, u, g, unknown, or other
  misc_difference 24: note = a, c, u, g, unknown, or other
  misc_difference 25: note = a, c, u, g, unknown, or other
  misc_difference 26: note = a, c, u, g, unknown, or other
  misc_difference 27: note = a, c, u, g, unknown, or other
  misc_difference 28: note = a, c, u, g, unknown, or other
  misc_difference 40: note = a, c, u, g, unknown, or other
  misc_difference 48: note = a, c, u, g, unknown, or other
  misc_difference 49: note = a, c, u, g, unknown, or other
  misc_difference 50: note = a, c, u, g, unknown, or other
  misc_difference 51: note = a, c, u, g, unknown, or other
  misc_difference 52: note = a, c, u, g, unknown, or other
  misc_difference 56: note = a, c, u, g, unknown, or other
  misc_difference 68: note = a, c, u, g, unknown, or other
  misc_difference 72: note = a, c, u, g, unknown, or other
  misc_difference 75: note = a, c, u, g, unknown, or other
  misc_difference 76: note = a, c, u, g, unknown, or other
  misc_difference 77: note = a, c, u, g, unknown, or other
  misc_difference 78: note = a, c, u, g, unknown, or other
  misc_difference 80: note = a, c, u, g, unknown, or other
  misc_difference 81: note = a, c, u, g, unknown, or other
  misc_difference 83: note = a, c, u, g, unknown, or other
  misc_difference 84: note = a, c, u, g, unknown, or other
  misc_difference 104: note = a, c, u, g, unknown, or other
  misc_difference 119: note = a, c, u, g, unknown, or other
  misc_difference 120: note = a, c, u, g, unknown, or other
  misc_difference 121: note = a, c, u, g, unknown, or other
  misc_difference 122: note = a, c, u, g, unknown, or other
  misc_difference 123: note = a, c, u, g, unknown, or other
  misc_difference 124: note = a, c, u, g, unknown, or other
  misc_difference 125: note = a, c, u, g, unknown, or other
  misc_difference 126: note = a, c, u, g, unknown, or other
  misc_difference 127: note = a, c, u, g, unknown, or other
  misc_difference 128: note = a, c, u, g, unknown, or other
  misc_difference 129: note = a, c, u, g, unknown, or other
  misc_difference 130: note = a, c, u, g, unknown, or other
  misc_difference 131: note = a, c, u, g, unknown, or other
  misc_difference 132: note = a, c, u, g, unknown, or other
  misc_difference 133: note = a, c, u, g, unknown, or other
  misc_difference 134: note = a, c, u, g, unknown, or other
  misc_difference 135: note = a, c, u, g, unknown, or other
  misc_difference 136: note = a, c, u, g, unknown, or other
  misc_difference 150: note = a, c, u, g, unknown, or other
  misc_difference 169: note = a, c, u, g, unknown, or other
  misc_difference 170: note = a, c, u, g, unknown, or other
  misc_difference 177: note = a, c, u, g, unknown, or other
  misc_difference 178: note = a, c, u, g, unknown, or other
  misc_difference 180: note = a, c, u, g, unknown, or other
  misc_difference 187: note = a, c, u, g, unknown, or other
  misc_difference 188: note = a, c, u, g, unknown, or other
  misc_difference 189: note = a, c, u, g, unknown, or other
  misc_difference 190: note = a, c, u, g, unknown, or other
  misc_difference 191: note = a, c, u, g, unknown, or other
  misc_difference 198: note = a, c, u, g, unknown, or other
  misc_difference 201: note = a, c, u, g, unknown, or other
  misc_difference 202: note = a, c, u, g, unknown, or other
  misc_difference 203: note = a, c, u, g, unknown, or other
  misc_difference 204: note = a, c, u, g, unknown, or other
  misc_difference 205: note = a, c, u, g, unknown, or other
  misc_difference 206: note = a, c, u, g, unknown, or other
  misc_difference 207: note = a, c, u, g, unknown, or other
  misc_difference 209: note = a, c, u, g, unknown, or other
  misc_difference 210: note = a, c, u, g, unknown, or other
  misc_difference 211: note = a, c, u, g, unknown, or other
  misc_difference 212: note = a, c, u, g, unknown, or other
  misc_difference 213: note = a, c, u, g, unknown, or other
  misc_difference 217: note = a, c, u, g, unknown, or other
  misc_difference 222: note = a, c, u, g, unknown, or other
  misc_difference 223: note = a, c, u, g, unknown, or other
  misc_difference 225: note = a, c, u, g, unknown, or other
nnnnnngggrrgrgcgagcccgynnnnncgtygrggrccnaccycgynnnnnaccntgggcagcycyncccnrgnnnncnnrnncyycycrccagcycggttgnacgctgtcgggrcannnnnnnnnnnnnnnnnnccragcccgcttgnrctacgtagrgcgagragnnccrggynncnrrcrccnnnnnccrcrcnrrnnnnnnnynnnnncrgngcggnncny

SEQ ID NO: 795551 - RNA, 147 nt, unidentified
  source 1..147: mol_type = unassigned RNA; note = 8dedd6
  misc_difference 13: note = a, c, u, g, unknown, or other
  misc_difference 14: note = a, c, u, g, unknown, or other
  misc_difference 15: note = a, c, u, g, unknown, or other
  misc_difference 16: note = a, c, u, g, unknown, or other
  misc_difference 19: note = a, c, u, g, unknown, or other
  misc_difference 20: note = a, c, u, g, unknown, or other
  misc_difference 22: note = a, c, u, g, unknown, or other
  misc_difference 26: note = a, c, u, g, unknown, or other
  misc_difference 27: note = a, c, u, g, unknown, or other
  misc_difference 28: note = a, c, u, g, unknown, or other
  misc_difference 29: note = a, c, u, g, unknown, or other
  misc_difference 31: note = a, c, u, g, unknown, or other
  misc_difference 35: note = a, c, u, g, unknown, or other
  misc_difference 41: note = a, c, u, g, unknown, or other
  misc_difference 42: note = a, c, u, g, unknown, or other
  misc_difference 46: note = a, c, u, g, unknown, or other
  misc_difference 47: note = a, c, u, g, unknown, or other
  misc_difference 50: note = a, c, u, g, unknown, or other
  misc_difference 51: note = a, c, u, g, unknown, or other
  misc_difference 55: note = a, c, u, g, unknown, or other
  misc_difference 59: note = a, c, u, g, unknown, or other
  misc_difference 70: note = a, c, u, g, unknown, or other
  misc_difference 71: note = a, c, u, g, unknown, or other
  misc_difference 72: note = a, c, u, g, unknown, or other
  misc_difference 74: note = a, c, u, g, unknown, or other
  misc_difference 75: note = a, c, u, g, unknown, or other
  misc_difference 76: note = a, c, u, g, unknown, or other
  misc_difference 77: note = a, c, u, g, unknown, or other
  misc_difference 78: note = a, c, u, g, unknown, or other
  misc_difference 79: note = a, c, u, g, unknown, or other
  misc_difference 82: note = a, c, u, g, unknown, or other
  misc_difference 90: note = a, c, u, g, unknown, or other
  misc_difference 97: note = a, c, u, g, unknown, or other
  misc_difference 103: note = a, c, u, g, unknown, or other
  misc_difference 104: note = a, c, u, g, unknown, or other
  misc_difference 107: note = a, c, u, g, unknown, or other
  misc_difference 109: note = a, c, u, g, unknown, or other
  misc_difference 116: note = a, c, u, g, unknown, or other
  misc_difference 119: note = a, c, u, g, unknown, or other
  misc_difference 125: note = a, c, u, g, unknown, or other
  misc_difference 126: note = a, c, u, g, unknown, or other
  misc_difference 127: note = a, c, u, g, unknown, or other
  misc_difference 128: note = a, c, u, g, unknown, or other
  misc_difference 131: note = a, c, u, g, unknown, or other
  misc_difference 133: note = a, c, u, g, unknown, or other
  misc_difference 135: note = a, c, u, g, unknown, or other
  misc_difference 136: note = a, c, u, g, unknown, or other
  misc_difference 142: note = a, c, u, g, unknown, or other
  misc_difference 145: note = a, c, u, g, unknown, or other
  misc_difference 146: note = a, c, u, g, unknown, or other
gaycygtcgryynnnnyynnrnrrynnnnrnyrynrccrgnncrrnngrnngtgncyynataggrgcytnnnynnnnnngcnccrtcacngtyytgnccgccnncyngnccggygnygnccrycnnnncynrnrnnagrrgnyrnnr

SEQ ID NO: 795552 - RNA, 274 nt, unidentified
  source 1..274: mol_type = unassigned RNA; note = 7ce5a8
  misc_difference 1: note = a, c, u, g, unknown, or other
  misc_difference 2: note = a, c, u, g, unknown, or other
  misc_difference 3: note = a, c, u, g, unknown, or other
  misc_difference 4: note = a, c, u, g, unknown, or other
  misc_difference 5: note = a, c, u, g, unknown, or other
  misc_difference 7: note = a, c, u, g, unknown, or other
  misc_difference 8: note = a, c, u, g, unknown, or other
  misc_difference 11: note = a, c, u, g, unknown, or other
  misc_difference 13: note = a, c, u, g, unknown, or other
  misc_difference 14: note = a, c, u, g, unknown, or other
  misc_difference 15: note = a, c, u, g, unknown, or other
  misc_difference 16: note = a, c, u, g, unknown, or other
  misc_difference 17: note = a, c, u, g, unknown, or other
  misc_difference 18: note = a, c, u, g, unknown, or other
  misc_difference 19: note = a, c, u, g, unknown, or other
  misc_difference 21: note = a, c, u, g, unknown, or other
  misc_difference 23: note = a, c, u, g, unknown, or other
  misc_difference 24: note = a, c, u, g, unknown, or other
  misc_difference 26: note = a, c, u, g, unknown, or other
  misc_difference 29: note = a, c, u, g, unknown, or other
  misc_difference 30: note = a, c, u, g, unknown, or other
  misc_difference 32: note = a, c, u, g, unknown, or other
  misc_difference 39: note = a, c, u, g, unknown, or other
  misc_difference 40: note = a, c, u, g, unknown, or other
  misc_difference 42: note = a, c, u, g, unknown, or other
  misc_difference 43: note = a, c, u, g, unknown, or other
  misc_difference 44: note = a, c, u, g, unknown, or other
  misc_difference 48: note = a, c, u, g, unknown, or other
  misc_difference 49: note = a, c, u, g, unknown, or other
  misc_difference 57: note = a, c, u, g, unknown, or other
  misc_difference 58: note = a, c, u, g, unknown, or other
  misc_difference 59: note = a, c, u, g, unknown, or other
  misc_difference 67: note = a, c, u, g, unknown, or other
  misc_difference 69: note = a, c, u, g, unknown, or other
  misc_difference 70: note = a, c, u, g, unknown, or other
  misc_difference 72: note = a, c, u, g, unknown, or other
  misc_difference 76: note = a, c, u, g, unknown, or other
  misc_difference 82: note = a, c, u, g, unknown, or other
  misc_difference 85: note = a, c, u, g, unknown, or other
  misc_difference 88: note = a, c, u, g, unknown, or other
  misc_difference 93: note = a, c, u, g, unknown, or other
  misc_difference 94: note = a, c, u, g, unknown, or other
  misc_difference 99: note = a, c, u, g, unknown, or other
  misc_difference 100: note = a, c, u, g, unknown, or other
  misc_difference 109: note = a, c, u, g, unknown, or other
  misc_difference 112: note = a, c, u, g, unknown, or other
  misc_difference 113: note = a, c, u, g, unknown, or other
  misc_difference 114: note = a, c, u, g, unknown, or other
  misc_difference 115: note = a, c, u, g, unknown, or other
  misc_difference 116: note = a, c, u, g, unknown, or other
  misc_difference 122: note = a, c, u, g, unknown, or other
  misc_difference 123: note = a, c, u, g, unknown, or other
  misc_difference 125: note = a, c, u, g, unknown, or other
  misc_difference 127: note = a, c, u, g, unknown, or other
  misc_difference 131: note = a, c, u, g, unknown, or other
  misc_difference 132: note = a, c, u, g, unknown, or other
  misc_difference 137: note = a, c, u, g, unknown, or other
  misc_difference 139: note = a, c, u, g, unknown, or other
  misc_difference 140: note = a, c, u, g, unknown, or other
  misc_difference 141: note = a, c, u, g, unknown, or other
  misc_difference 142: note = a, c, u, g, unknown, or other
  misc_difference 143: note = a, c, u, g, unknown, or other
  misc_difference 148: note = a, c, u, g, unknown, or other
  misc_difference 153: note = a, c, u, g, unknown, or other
  misc_difference 156: note = a, c, u, g, unknown, or other
  misc_difference 159: note = a, c, u, g, unknown, or other
  misc_difference 160: note = a, c, u, g, unknown, or other
  misc_difference 161: note = a, c, u, g, unknown, or other
  misc_difference 162: note = a, c, u, g, unknown, or other
  misc_difference 166: note = a, c, u, g, unknown, or other
  misc_difference 168: note = a, c, u, g, unknown, or other
  misc_difference 169: note = a, c, u, g, unknown, or other
  misc_difference 170: note = a, c, u, g, unknown, or other
  misc_difference 172: note = a, c, u, g, unknown, or other
  misc_difference 173: note = a, c, u, g, unknown, or other
  misc_difference 174: note = a, c, u, g, unknown, or other
  misc_difference 175: note = a, c, u, g, unknown, or other
  misc_difference 176: note = a, c, u, g, unknown, or other
  misc_difference 177: note = a, c, u, g, unknown, or other
  misc_difference 181: note = a, c, u, g, unknown, or other
  misc_difference 182: note = a, c, u, g, unknown, or other
  misc_difference 183: note = a, c, u, g, unknown, or other
  misc_difference 184: note = a, c, u, g, unknown, or other
  misc_difference 185: note = a, c, u, g, unknown, or other
  misc_difference 186: note = a, c, u, g, unknown, or other
  misc_difference 188: note = a, c, u, g, unknown, or other
  misc_difference 189: note = a, c, u, g, unknown, or other
  misc_difference 190: note = a, c, u, g, unknown, or other
  misc_difference 191: note = a, c, u, g, unknown, or other
  misc_difference 193: note = a, c, u, g, unknown, or other
  misc_difference 197: note = a, c, u, g, unknown, or other
  misc_difference 198: note = a, c, u, g, unknown, or other
  misc_difference 200: note = a, c, u, g, unknown, or other
  misc_difference 201: note = a, c, u, g, unknown, or other
  misc_difference 202: note = a, c, u, g, unknown, or other
  misc_difference 203: note = a, c, u, g, unknown, or other
  misc_difference 204: note = a, c, u, g, unknown, or other
  misc_difference 206: note = a, c, u, g, unknown, or other
  misc_difference 207: note = a, c, u, g, unknown, or other
  misc_difference 210: note = a, c, u, g, unknown, or other
  misc_difference 211: note = a, c, u, g, unknown, or other
  misc_difference 212: note = a, c, u, g, unknown, or other
  misc_difference 213: note = a, c, u, g, unknown, or other
  misc_difference 214: note = a, c, u, g, unknown, or other
  misc_difference 215: note = a, c, u, g, unknown, or other
  misc_difference 216: note = a, c, u, g, unknown, or other
  misc_difference 217: note = a, c, u, g, unknown, or other
  misc_difference 220: note = a, c, u, g, unknown, or other
  misc_difference 222: note = a, c, u, g, unknown, or other
  misc_difference 223: note = a, c, u, g, unknown, or other
  misc_difference 224: note = a, c, u, g, unknown, or other
  misc_difference 225: note = a, c, u, g, unknown, or other
  misc_difference 226: note = a, c, u, g, unknown, or other
  misc_difference 227: note = a, c, u, g, unknown, or other
  misc_difference 228: note = a, c, u, g, unknown, or other
  misc_difference 231: note = a, c, u, g, unknown, or other
  misc_difference 232: note = a, c, u, g, unknown, or other
  misc_difference 233: note = a, c, u, g, unknown, or other
  misc_difference 234: note = a, c, u, g, unknown, or other
  misc_difference 235: note = a, c, u, g, unknown, or other
  misc_difference 236: note = a, c, u, g, unknown, or other
  misc_difference 237: note = a, c, u, g, unknown, or other
  misc_difference 239: note = a, c, u, g, unknown, or other
  misc_difference 240: note = a, c, u, g, unknown, or other
  misc_difference 241: note = a, c, u, g, unknown, or other
  misc_difference 242: note = a, c, u, g, unknown, or other
  misc_difference 243: note = a, c, u, g, unknown, or other
  misc_difference 244: note = a, c, u, g, unknown, or other
  misc_difference 245: note = a, c, u, g, unknown, or other
  misc_difference 246: note = a, c, u, g, unknown, or other
  misc_difference 247: note = a, c, u, g, unknown, or other
  misc_difference 248: note = a, c, u, g, unknown, or other
  misc_difference 251: note = a, c, u, g, unknown, or other
  misc_difference 252: note = a, c, u, g, unknown, or other
  misc_difference 254: note = a, c, u, g, unknown, or other
  misc_difference 256: note = a, c, u, g, unknown, or other
  misc_difference 257: note = a, c, u, g, unknown, or other
  misc_difference 259: note = a, c, u, g, unknown, or other
  misc_difference 263: note = a, c, u, g, unknown, or other
  misc_difference 264: note = a, c, u, g, unknown, or other
  misc_difference 265: note = a, c, u, g, unknown, or other
  misc_difference 268: note = a, c, u, g, unknown, or other
  misc_difference 270: note = a, c, u, g, unknown, or other
  misc_difference 271: note = a, c, u, g, unknown, or other
  misc_difference 272: note = a, c, u, g, unknown, or other
  misc_difference 273: note = a, c, u, g, unknown, or other
  misc_difference 274: note = a, c, u, g, unknown, or other
nnnnnynnrynrnnnnnnnynrnnrnrcnnyngagcyynnynnnytcnntaryrycnnngaryrytnynnanragnytgrgncynygngtaynncgrynnygtcrtgtngcnnnnnagcrcnnrnangagnnttgtntnnnnnyrccncyrynrrnrynnnnraynynnnynnnnnnryynnnnnnrnnnnyngyynnrnnnnnrnnrannnnnnnnrynrnnnnnnnrynnnnnnnynnnnnnnnnnrynnrnrnnyntatnnnyyntnnnnn

SEQ ID NO: 795553 - RNA, 203 nt, unidentified
  source 1..203: mol_type = unassigned RNA; note = a77ff1
  misc_difference 3: note = a, c, u, g, unknown, or other
  misc_difference 4: note = a, c, u, g, unknown, or other
  misc_difference 5: note = a, c, u, g, unknown, or other
  misc_difference 6: note = a, c, u, g, unknown, or other
  misc_difference 7: note = a, c, u, g, unknown, or other
  misc_difference 8: note = a, c, u, g, unknown, or other
  misc_difference 9: note = a, c, u, g, unknown, or other
  misc_difference 10: note = a, c, u, g, unknown, or other
  misc_difference 11: note = a, c, u, g, unknown, or other
  misc_difference 12: note = a, c, u, g, unknown, or other
  misc_difference 14: note = a, c, u, g, unknown, or other
  misc_difference 17: note = a, c, u, g, unknown, or other
  misc_difference 18: note = a, c, u, g, unknown, or other
  misc_difference 20: note = a, c, u, g, unknown, or other
  misc_difference 21: note = a, c, u, g, unknown, or other
  misc_difference 22: note = a, c, u, g, unknown, or other
  misc_difference 24: note = a, c, u, g, unknown, or other
  misc_difference 30: note = a, c, u, g, unknown, or other
  misc_difference 31: note = a, c, u, g, unknown, or other
  misc_difference 32: note = a, c, u, g, unknown, or other
  misc_difference 34: note = a, c, u, g, unknown, or other
  misc_difference 36: note = a, c, u, g, unknown, or other
  misc_difference 37: note = a, c, u, g, unknown, or other
  misc_difference 38: note = a, c, u, g, unknown, or other
  misc_difference 39: note = a, c, u, g, unknown, or other
  misc_difference 40: note = a, c, u, g, unknown, or other
  misc_difference 41: note = a, c, u, g, unknown, or other
  misc_difference 42: note = a, c, u, g, unknown, or other
  misc_difference 43: note = a, c, u, g, unknown, or other
  misc_difference 44: note = a, c, u, g, unknown, or other
  misc_difference 46: note = a, c, u, g, unknown, or other
  misc_difference 47: note = a, c, u, g, unknown, or other
  misc_difference 48: note = a, c, u, g, unknown, or other
  misc_difference 49: note = a, c, u, g, unknown, or other
  misc_difference 50: note = a, c, u, g, unknown, or other
  misc_difference 51: note = a, c, u, g, unknown, or other
  misc_difference 53: note = a, c, u, g, unknown, or other
  misc_difference 54: note = a, c, u, g, unknown, or other
  misc_difference 56: note = a, c, u, g, unknown, or other
  misc_difference 59: note = a, c, u, g, unknown, or other
  misc_difference 60: note = a, c, u, g, unknown, or other
  misc_difference 62: note = a, c, u, g, unknown, or other
  misc_difference 63: note = a, c, u, g, unknown, or other
  misc_difference 69: note = a, c, u, g, unknown, or other
  misc_difference 70: note = a, c, u, g, unknown, or other
  misc_difference 71: note = a, c, u, g, unknown, or other
  misc_difference 72: note = a, c, u, g, unknown, or other
  misc_difference 73: note = a, c, u, g, unknown, or other
  misc_difference 74: note = a, c, u, g, unknown, or other
  misc_difference 75: note = a, c, u, g, unknown, or other
  misc_difference 76: note = a, c, u, g, unknown, or other
  misc_difference 84: note = a, c, u, g, unknown, or other
  misc_difference 85: note = a, c, u, g, unknown, or other
  misc_difference 86: note = a, c, u, g, unknown, or other
  misc_difference 87: note = a, c, u, g, unknown, or other
  misc_difference 88: note = a, c, u, g, unknown, or other
  misc_difference 89: note = a, c, u, g, unknown, or other
  misc_difference 90: note = a, c, u, g, unknown, or other
  misc_difference 91: note = a, c, u, g, unknown, or other
  misc_difference 94: note = a, c, u, g, unknown, or other
  misc_difference 99: note = a, c, u, g, unknown, or other
  misc_difference 100: note = a, c, u, g, unknown, or other
  misc_difference 101: note = a, c, u, g, unknown, or other
  misc_difference 102: note = a, c, u, g, unknown, or other
  misc_difference 103: note = a, c, u, g, unknown, or other
  misc_difference 104: note = a, c, u, g, unknown, or other
  misc_difference 107: note = a, c, u, g, unknown, or other
  misc_difference 108: note = a, c, u, g, unknown, or other
  misc_difference 117: note = a, c, u, g, unknown, or other
  misc_difference 118: note = a, c, u, g, unknown, or other
  misc_difference 120: note = a, c, u, g, unknown, or other
  misc_difference 121: note = a, c, u, g, unknown, or other
  misc_difference 125: note = a, c, u, g, unknown, or other
  misc_difference 132: note = a, c, u, g, unknown, or other
  misc_difference 133: note = a, c, u, g, unknown, or other
  misc_difference 134: note = a, c, u, g, unknown, or other
  misc_difference 135: note = a, c, u, g, unknown, or other
  misc_difference 141: note = a, c, u, g, unknown, or other
  misc_difference 142: note = a, c, u, g, unknown, or other
  misc_difference 143: note = a, c, u, g, unknown, or other
  misc_difference 144: note = a, c, u, g, unknown, or other
  misc_difference 145: note = a, c, u, g, unknown, or other
  misc_difference 147: note = a, c, u, g, unknown, or other
  misc_difference 148: note = a, c, u, g, unknown, or other
  misc_difference 149: note = a, c, u, g, unknown, or other
  misc_difference 150: note = a, c, u, g, unknown, or other
  misc_difference 151: note = a, c, u, g, unknown, or other
  misc_difference 152: note = a, c, u, g, unknown, or other
  misc_difference 153: note = a, c, u, g, unknown, or other
  misc_difference 154: note = a, c, u, g, unknown, or other
  misc_difference 155: note = a, c, u, g, unknown, or other
  misc_difference 157: note = a, c, u, g, unknown, or other
  misc_difference 158: note = a, c, u, g, unknown, or other
  misc_difference 160: note = a, c, u, g, unknown, or other
  misc_difference 173: note = a, c, u, g, unknown, or other
  misc_difference 174: note = a, c, u, g, unknown, or other
  misc_difference 178: note = a, c, u, g, unknown, or other
  misc_difference 179: note = a, c, u, g, unknown, or other
  misc_difference 180: note = a, c, u, g, unknown, or other
  misc_difference 181: note = a, c, u, g, unknown, or other
  misc_difference 182: note = a, c, u, g, unknown, or other
  misc_difference 183: note = a, c, u, g, unknown, or other
  misc_difference 184: note = a, c, u, g, unknown, or other
  misc_difference 186: note = a, c, u, g, unknown, or other
  misc_difference 192: note = a, c, u, g, unknown, or other
  misc_difference 193: note = a, c, u, g, unknown, or other
  misc_difference 194: note = a, c, u, g, unknown, or other
  misc_difference 195: note = a, c, u, g, unknown, or other
  misc_difference 196: note = a, c, u, g, unknown, or other
  misc_difference 197: note = a, c, u, g, unknown, or other
  misc_difference 200: note = a, c, u, g, unknown, or other
  misc_difference 201: note = a, c, u, g, unknown, or other
aannnnnnnnnnrnrynngnnnrnyggtrnnnyntnnnnnnnnnrnnnnnnrnnrnrrnngnnggytgnnnnnnnnctgggrynnnnnnnnrancccgnnnnnnygnntarcrrccnnynnycgnayyrrynnnntgggrnnnnnynnnnnnnnnrnnancccgratagaygnntggnnnnnnnynycryynnnnnnyynnyy

SEQ ID NO: 795554 - RNA, 365 nt, unidentified
  source 1..365: mol_type = unassigned RNA; note = 44e338
  misc_difference 1: note = a, c, u, g, unknown, or other
  misc_difference 2: note = a, c, u, g, unknown, or other
  misc_difference 4: note = a, c, u, g, unknown, or other
  misc_difference 5: note = a, c, u, g, unknown, or other
  misc_difference 11: note = a, c, u, g, unknown, or other
  misc_difference 14: note = a, c, u, g, unknown, or other
  misc_difference 15: note = a, c, u, g, unknown, or other
  misc_difference 17: note = a, c, u, g, unknown, or other
  misc_difference 18: note = a, c, u, g, unknown, or other
  misc_difference 19: note = a, c, u, g, unknown, or other
  misc_difference 20: note = a, c, u, g, unknown, or other
  misc_difference 24: note = a, c, u, g, unknown, or other
  misc_difference 26: note = a, c, u, g, unknown, or other
  misc_difference 27: note = a, c, u, g, unknown, or other
  misc_difference 32: note = a, c, u, g, unknown, or other
  misc_difference 33: note = a, c, u, g, unknown, or other
  misc_difference 34: note = a, c, u, g, unknown, or other
  misc_difference 35: note = a, c, u, g, unknown, or other
  misc_difference 36: note = a, c, u, g, unknown, or other
  misc_difference 37: note = a, c, u, g, unknown, or other
  misc_difference 38: note = a, c, u, g, unknown, or other
  misc_difference 39: note = a, c, u, g, unknown, or other
  misc_difference 41: note = a, c, u, g, unknown, or other
  misc_difference 42: note = a, c, u, g, unknown, or other
  misc_difference 43: note = a, c, u, g, unknown, or other
  misc_difference 44: note = a, c, u, g, unknown, or other
  misc_difference 46: note = a, c, u, g, unknown, or other
  misc_difference 47: note = a, c, u, g, unknown, or other
  misc_difference 48: note = a, c, u, g, unknown, or other
  misc_difference 49: note = a, c, u, g, unknown, or other
  misc_difference 50: note = a, c, u, g, unknown, or other
  misc_difference 51: note = a, c, u, g, unknown, or other
  misc_difference 53: note = a, c, u, g, unknown, or other
  misc_difference 56: note = a, c, u, g, unknown, or other
  misc_difference 58: note = a, c, u, g, unknown, or other
  misc_difference 60: note = a, c, u, g, unknown, or other
  misc_difference 61: note = a, c, u, g, unknown, or other
  misc_difference 62: note = a, c, u, g, unknown, or other
  misc_difference 63: note = a, c, u, g, unknown, or other
  misc_difference 64: note = a, c, u, g, unknown, or other
  misc_difference 65: note = a, c, u, g, unknown, or other
  misc_difference 68: note = a, c, u, g, unknown, or other
  misc_difference 70: note = a, c, u, g, unknown, or other
  misc_difference 72: note = a, c, u, g, unknown, or other
  misc_difference 73: note = a, c, u, g, unknown, or other
  misc_difference 77: note = a, c, u, g, unknown, or other
  misc_difference 86: note = a, c, u, g, unknown, or other
  misc_difference 90: note = a, c, u, g, unknown, or other
  misc_difference 91: note = a, c, u, g, unknown, or other
  misc_difference 99: note = a, c, u, g, unknown, or other
  misc_difference 102: note = a, c, u, g, unknown, or other
  misc_difference 106: note = a, c, u, g, unknown, or other
  misc_difference 107: note = a, c, u, g, unknown, or other
  misc_difference 108: note = a, c, u, g, unknown, or other
  misc_difference 109: note = a, c, u, g, unknown, or other
  misc_difference 110: note = a, c, u, g, unknown, or other
  misc_difference 111: note = a, c, u, g, unknown, or other
  misc_difference 112: note = a, c, u, g, unknown, or other
  misc_difference 114: note = a, c, u, g, unknown, or other
  misc_difference 115: note = a, c, u, g, unknown, or other
  misc_difference 121: note = a, c, u, g, unknown, or other
  misc_difference 123: note = a, c, u, g, unknown, or other
  misc_difference 124: note = a, c, u, g, unknown, or other
  misc_difference 126: note = a, c, u, g, unknown, or other
  misc_difference 127: note = a, c, u, g, unknown, or other
  misc_difference 128: note = a, c, u, g, unknown, or other
  misc_difference 129: note = a, c, u, g, unknown, or other
  misc_difference 130: note = a, c, u, g, unknown, or other
  misc_difference 131: note = a, c, u, g, unknown, or other
  misc_difference 132: note = a, c, u, g, unknown, or other
  misc_difference 133: note = a, c, u, g, unknown, or other
  misc_difference 134: note = a, c, u, g, unknown, or other
  misc_difference 135: note = a, c, u, g, unknown, or other
  misc_difference 136: note = a, c, u, g, unknown, or other
  misc_difference 139: note = a, c, u, g, unknown, or other
  misc_difference 143: note = a, c, u, g, unknown, or other
  misc_difference 144: note = a, c, u, g, unknown, or other
  misc_difference 145: note = a, c, u, g, unknown, or other
  misc_difference 146: note = a, c, u, g, unknown, or other
  misc_difference 147: note = a, c, u, g, unknown, or other
  misc_difference 148: note = a, c, u, g, unknown, or other
  misc_difference 152: note = a, c, u, g, unknown, or other
  misc_difference 156: note = a, c, u, g, unknown, or other
  misc_difference 158: note = a, c, u, g, unknown, or other
  misc_difference 165: note = a, c, u, g, unknown, or other
  misc_difference 166: note = a, c, u, g, unknown, or other
  misc_difference 167: note = a, c, u, g, unknown, or other
  misc_difference 170: note = a, c, u, g, unknown, or other
  misc_difference 171: note = a, c, u, g, unknown, or other
  misc_difference 175: note = a, c, u, g, unknown, or other
  misc_difference 177: note = a, c, u, g, unknown, or other
  misc_difference 184: note = a, c, u, g, unknown, or other
  misc_difference 188: note = a, c, u, g, unknown, or other
  misc_difference 191: note = a, c, u, g, unknown, or other
  misc_difference 192: note = a, c, u, g, unknown, or other
  misc_difference 193: note = a, c, u, g, unknown, or other
  misc_difference 194: note = a, c, u, g, unknown, or other
  misc_difference 195: note = a, c, u, g, unknown, or other
  misc_difference 196: note = a, c, u, g, unknown, or other
  misc_difference 197: note = a, c, u, g, unknown, or other
  misc_difference 198: note = a, c, u, g, unknown, or other
  misc_difference 199: note = a, c, u, g, unknown, or other
  misc_difference 200: note = a, c, u, g, unknown, or other
  misc_difference 201: note = a, c, u, g, unknown, or other
  misc_difference 202: note = a, c, u, g, unknown, or other
  misc_difference 203: note = a, c, u, g, unknown, or other
  misc_difference 204: note = a, c, u, g, unknown, or other
  misc_difference 205: note = a, c, u, g, unknown, or other
  misc_difference 206: note = a, c, u, g, unknown, or other
  misc_difference 210: note = a, c, u, g, unknown, or other
  misc_difference 214: note = a, c, u, g, unknown, or other
  misc_difference 215: note = a, c, u, g, unknown, or other
  misc_difference 223: note = a, c, u, g, unknown, or other
  misc_difference 224: note = a, c, u, g, unknown, or other
  misc_difference 228: note = a, c, u, g, unknown, or other
  misc_difference 230: note = a, c, u, g, unknown, or other
  misc_difference 233: note = a, c, u, g, unknown, or other
  misc_difference 234: note = a, c, u, g, unknown, or other
  misc_difference 235: note = a, c, u, g, unknown, or other
  misc_difference 240: note = a, c, u, g, unknown, or other
  misc_difference 245: note = a, c, u, g, unknown, or other
  misc_difference 249: note = a, c, u, g, unknown, or other
  misc_difference 250: note = a, c, u, g, unknown, or other
  misc_difference 251: note = a, c, u, g, unknown, or other
  misc_difference 252: note = a, c, u, g, unknown, or other
  misc_difference 253: note = a, c, u, g, unknown, or other
  misc_difference 260: note = a, c, u, g, unknown, or other
  misc_difference 261: note = a, c, u, g, unknown, or other
  misc_difference 262: note = a, c, u, g, unknown, or other
  misc_difference 263: note = a, c, u, g, unknown, or other
  misc_difference 264: note = a, c, u, g, unknown, or other
  misc_difference 265: note = a, c, u, g, unknown, or other
  misc_difference 266: note = a, c, u, g, unknown, or other
  misc_difference 267: note = a, c, u, g, unknown, or other
  misc_difference 268: note = a, c, u, g, unknown, or other
  misc_difference 273: note = a, c, u, g, unknown, or other
  misc_difference 274: note = a, c, u, g, unknown, or other
  misc_difference 276: note = a, c, u, g, unknown, or other
  misc_difference 280: note = a, c, u, g, unknown, or other
  misc_difference 282: note = a, c, u, g, unknown, or other
  misc_difference 284: note = a, c, u, g, unknown, or other
  misc_difference 286: note = a, c, u, g, unknown, or other
  misc_difference 287: note = a, c, u, g, unknown, or other
  misc_difference 288: note = a, c, u, g, unknown, or other
  misc_difference 289: note = a, c, u, g, unknown, or other
  misc_difference 290: note = a, c, u, g, unknown, or other
  misc_difference 291: note = a, c, u, g, unknown, or other
  misc_difference 292: note = a, c, u, g, unknown, or other
  misc_difference 293: note = a, c, u, g, unknown, or other
  misc_difference 295: note = a, c, u, g, unknown, or other
  misc_difference 296: note = a, c, u, g, unknown, or other
  misc_difference 297: note = a, c, u, g, unknown, or other
  misc_difference 299: note = a, c, u, g, unknown, or other
  misc_difference 300: note = a, c, u, g, unknown, or other
  misc_difference 301: note = a, c, u, g, unknown, or other
  misc_difference 305: note = a, c, u, g, unknown, or other
  misc_difference 306: note = a, c, u, g, unknown, or other
  misc_difference 307: note = a, c, u, g, unknown, or other
  misc_difference 308: note = a, c, u, g, unknown, or other
  misc_difference 310: note = a, c, u, g, unknown, or other
  misc_difference 311: note = a, c, u, g, unknown, or other
  misc_difference 312: note = a, c, u, g, unknown, or other
  misc_difference 313: note = a, c, u, g, unknown, or other
  misc_difference 314: note = a, c, u, g, unknown, or other
  misc_difference 315: note = a, c, u, g, unknown, or other
  misc_difference 316: note = a, c, u, g, unknown, or other
  misc_difference 317: note = a, c, u, g, unknown, or other
  misc_difference 318: note = a, c, u, g, unknown, or other
  misc_difference 319: note = a, c, u, g, unknown, or other
  misc_difference 321: note = a, c, u, g, unknown, or other
  misc_difference 322: note = a, c, u, g, unknown, or other
  misc_difference 323: note = a, c, u, g, unknown, or other
  misc_difference 325: note = a, c, u, g, unknown, or other
  misc_difference 328: note = a, c, u, g, unknown, or other
  misc_difference 345: note = a, c, u, g, unknown, or other
  misc_difference 346: note = a, c, u, g, unknown, or other
  misc_difference 347: note = a, c, u, g, unknown, or other
  misc_difference 348: note = a, c, u, g, unknown, or other
  misc_difference 349: note = a, c, u, g, unknown, or other
  misc_difference 350: note = a, c, u, g, unknown, or other
  misc_difference 351: note = a, c, u, g, unknown, or other
  misc_difference 355: note = a, c, u, g, unknown, or other
  misc_difference 357: note = a, c, u, g, unknown, or other
  misc_difference 360: note = a, c, u, g, unknown, or other
  misc_difference 361: note = a, c, u, g, unknown, or other
  misc_difference 362: note = a, c, u, g, unknown, or other
  misc_difference 363: note = a, c, u, g, unknown, or other
nnynnyygrrnyynnynnnnyrrngnnyryynnnnnnnnynnnnynnnnnnrnyrnynrnnnnnngynrnynnryynrgcggayyngggnngccgggrnagnctcnnnnnnnrnnyytrrnynnynnnnnnnnnnnagnyycnnnnnntgrntagncncccggcnnnyanncccnanrygacyntagncynnnnnnnnnnnnnnnnragncycnnatryrygnntggnrnrrnnnrrcynryrcngycnnnnnrrtycgnnnnnnnnnryyrnnrnyrynrnynynnnnnnnnynnnrnnnyrynnnnynnnnnnnnnnynnnrnrgncgtcctgyrrrrycarnnnnnnnyyynrnyrnnnnrg

SEQ ID NO: 795555 - RNA, 249 nt, unidentified
  source 1..249: mol_type = unassigned RNA; note = 137b42
  misc_difference 1: note = a, c, u, g, unknown, or other
  misc_difference 2: note = a, c, u, g, unknown, or other
  misc_difference 3: note = a, c, u, g, unknown, or other
  misc_difference 4: note = a, c, u, g, unknown, or other
  misc_difference 5: note = a, c, u, g, unknown, or other
  misc_difference 6: note = a, c, u, g, unknown, or other
  misc_difference 7: note = a, c, u, g, unknown, or other
  misc_difference 8: note = a, c, u, g, unknown, or other
  misc_difference 10: note = a, c, u, g, unknown, or other
  misc_difference 11: note = a, c, u, g, unknown, or other
  misc_difference 12: note = a, c, u, g, unknown, or other
  misc_difference 13: note = a, c, u, g, unknown, or other
  misc_difference 14: note = a, c, u, g, unknown, or other
  misc_difference 15: note = a, c, u, g, unknown, or other
  misc_difference 16: note = a, c, u, g, unknown, or other
  misc_difference 20: note = a, c, u, g, unknown, or other
  misc_difference 22: note = a, c, u, g, unknown, or other
  misc_difference 24: note = a, c, u, g, unknown, or other
  misc_difference 25: note = a, c, u, g, unknown, or other
  misc_difference 27: note = a, c, u, g, unknown, or other
  misc_difference 33: note = a, c, u, g, unknown, or other
  misc_difference 34: note = a, c, u, g, unknown, or other
  misc_difference 39: note = a, c, u, g, unknown, or other
  misc_difference 44: note = a, c, u, g, unknown, or other
  misc_difference 45: note = a, c, u, g, unknown, or other
  misc_difference 47: note = a, c, u, g, unknown, or other
  misc_difference 48: note = a, c, u, g, unknown, or other
  misc_difference 49: note = a, c, u, g, unknown, or other
  misc_difference 50: note = a, c, u, g, unknown, or other
  misc_difference 51: note = a, c, u, g, unknown, or other
  misc_difference 52: note = a, c, u, g, unknown, or other
  misc_difference 58: note = a, c, u, g, unknown, or other
  misc_difference 63: note = a, c, u, g, unknown, or other
  misc_difference 64: note = a, c, u, g, unknown, or other
  misc_difference 65: note = a, c, u, g, unknown, or other
  misc_difference 66: note = a, c, u, g, unknown, or other
  misc_difference 75: note = a, c, u, g, unknown, or other
  misc_difference 76: note = a, c, u, g, unknown, or other
  misc_difference 77: note = a, c, u, g, unknown, or other
  misc_difference 78: note = a, c, u, g, unknown, or other
  misc_difference 84: note = a, c, u, g, unknown, or other
  misc_difference 88: note = a, c, u, g, unknown, or other
  misc_difference 89: note = a, c, u, g, unknown, or other
  misc_difference 90: note = a, c, u, g, unknown, or other
  misc_difference 95: note = a, c, u, g, unknown, or other
  misc_difference 96: note = a, c, u, g, unknown, or other
  misc_difference 97: note = a, c, u, g, unknown, or other
  misc_difference 99: note = a, c, u, g, unknown, or other
  misc_difference 100: note = a, c, u, g, unknown, or other
  misc_difference 101: note = a, c, u, g, unknown, or other
  misc_difference 108: note = a, c, u, g, unknown, or other
  misc_difference 109: note = a, c, u, g, unknown, or other
  misc_difference 110: note = a, c, u, g, unknown, or other
  misc_difference 111: note = a, c, u, g, unknown, or other
  misc_difference 112: note = a, c, u, g, unknown, or other
  misc_difference 113: note = a, c, u, g, unknown, or other
  misc_difference 118: note = a, c, u, g, unknown, or other
  misc_difference 119: note = a, c, u, g, unknown, or other
  misc_difference 120: note = a, c, u, g, unknown, or other
  misc_difference 126: note = a, c, u, g, unknown, or other
  misc_difference 128: note = a, c, u, g, unknown, or other
  misc_difference 130: note = a, c, u, g, unknown, or other
  misc_difference 136: note = a, c, u, g, unknown, or other
  misc_difference 142: note = a, c, u, g, unknown, or other
  misc_difference 149: note = a, c, u, g, unknown, or other
  misc_difference 150: note = a, c, u, g, unknown, or other
  misc_difference 151: note = a, c, u, g, unknown, or other
  misc_difference 152: note = a, c, u, g, unknown, or other
  misc_difference 153: note = a, c, u, g, unknown, or other
  misc_difference 154: note = a, c, u, g, unknown, or other
  misc_difference 155: note = a, c, u, g, unknown, or other
  misc_difference 174: note = a, c, u, g, unknown, or other
  misc_difference 176: note = a, c, u, g, unknown, or other
  misc_difference 180: note = a, c, u, g, unknown, or other
  misc_difference 181: note = a, c, u, g, unknown, or other
  misc_difference 186: note = a, c, u, g, unknown, or other
  misc_difference 187: note = a, c, u, g, unknown, or other
  misc_difference 188: note = a, c, u, g, unknown, or other
  misc_difference 189: note = a, c, u, g, unknown, or other
  misc_difference 190: note = a, c, u, g, unknown, or other
  misc_difference 191: note = a, c, u, g, unknown, or other
  misc_difference 192: note = a, c, u, g, unknown, or other
  misc_difference 193: note = a, c, u, g, unknown, or other
  misc_difference 200: note = a, c, u, g, unknown, or other
  misc_difference 203: note = a, c, u, g, unknown, or other
  misc_difference 204: note = a, c, u, g, unknown, or other
  misc_difference 205: note = a, c, u, g, unknown, or other
  misc_difference 206: note = a, c, u, g, unknown, or other
  misc_difference 218: note = a, c, u, g, unknown, or other
  misc_difference 219: note = a, c, u, g, unknown, or other
  misc_difference 220: note = a, c, u, g, unknown, or other
  misc_difference 221: note = a, c, u, g, unknown, or other
  misc_difference 224: note = a, c, u, g, unknown, or other
  misc_difference 225: note = a, c, u, g, unknown, or other
  misc_difference 226: note = a, c, u, g, unknown, or other
  misc_difference 227: note = a, c, u, g, unknown, or other
  misc_difference 228: note = a, c, u, g, unknown, or other
  misc_difference 230: note = a, c, u, g, unknown, or other
  misc_difference 231: note = a, c, u, g, unknown, or other
  misc_difference 232: note = a, c, u, g, unknown, or other
  misc_difference 233: note = a, c, u, g, unknown, or other
  misc_difference 234: note = a, c, u, g, unknown, or other
  misc_difference 235: note = a, c, u, g, unknown, or other
  misc_difference 236: note = a, c, u, g, unknown, or other
  misc_difference 237: note = a, c, u, g, unknown, or other
  misc_difference 239: note = a, c, u, g, unknown, or other
  misc_difference 240: note = a, c, u, g, unknown, or other
  misc_difference 241: note = a, c, u, g, unknown, or other
  misc_difference 242: note = a, c, u, g, unknown, or other
  misc_difference 243: note = a, c, u, g, unknown, or other
  misc_difference 244: note = a, c, u, g, unknown, or other
  misc_difference 245: note = a, c, u, g, unknown, or other
  misc_difference 246: note = a, c, u, g, unknown, or other
  misc_difference 247: note = a, c, u, g, unknown, or other
  misc_difference 248: note = a, c, u, g, unknown, or other
  misc_difference 249: note = a, c, u, g, unknown, or other
nnnnnnnnrnnnnnnnyrrnynynnrnctggynngrgcnrccgnnrnnnnnncrggtnyycynnnnrrrrrccgnnnnyyagangggnnngcycnnnynnnrgcttynnnnnncgycnnnrrgcgnanrnagyaynrggtgnyygryynnnnnnnrrycrrcacggatagaagntngtynnrgrynnnnnnnnyyyracnyynnnngragcyrccagnnnnrynnnnnynnnnnnnnrnnnnnnnnnnn

SEQ ID NO: 795556 - RNA, 227 nt, unidentified
  source 1..227: mol_type = unassigned RNA; note = 06b23c
  misc_difference 2: note = a, c, u, g, unknown, or other
  misc_difference 3: note = a, c, u, g, unknown, or other
  misc_difference 4: note = a, c, u, g, unknown, or other
  misc_difference 5: note = a, c, u, g, unknown, or other
  misc_difference 16: note = a, c, u, g, unknown, or other
  misc_difference 17: note = a, c, u, g, unknown, or other
  misc_difference 19: note = a, c, u, g, unknown, or other
  misc_difference 31: note = a, c, u, g, unknown, or other
  misc_difference 32: note = a, c, u, g, unknown, or other
  misc_difference 56: note = a, c, u, g, unknown, or other
  misc_difference 57: note = a, c, u, g, unknown, or other
  misc_difference 58: note = a, c, u, g, unknown, or other
  misc_difference 61: note = a, c, u, g, unknown, or other
  misc_difference 62: note = a, c, u, g, unknown, or other
  misc_difference 72: note = a, c, u, g, unknown, or other
  misc_difference 73: note = a, c, u, g, unknown, or other
  misc_difference 74: note = a, c, u, g, unknown, or other
  misc_difference 75: note = a, c, u, g, unknown, or other
  misc_difference 77: note = a, c, u, g, unknown, or other
  misc_difference 88: note = a, c, u, g, unknown, or other
  misc_difference 89: note = a, c, u, g, unknown, or other
  misc_difference 90: note = a, c, u, g, unknown, or other
  misc_difference 92: note = a, c, u, g, unknown, or other
  misc_difference 96: note = a, c, u, g, unknown, or other
  misc_difference 145: note = a, c, u, g, unknown, or other
  misc_difference 151: note = a, c, u, g, unknown, or other
  misc_difference 153: note = a, c, u, g, unknown, or other
  misc_difference 154: note = a, c, u, g, unknown, or other
  misc_difference 155: note = a, c, u, g, unknown, or other
  misc_difference 185: note = a, c, u, g, unknown, or other
  misc_difference 186: note = a, c, u, g, unknown, or other
  misc_difference 187: note = a, c, u, g, unknown, or other
  misc_difference 189: note = a, c, u, g, unknown, or other
  misc_difference 190: note = a, c, u, g, unknown, or other
  misc_difference 191: note = a, c, u, g, unknown, or other
  misc_difference 192: note = a, c, u, g, unknown, or other
  misc_difference 193: note = a, c, u, g, unknown, or other
  misc_difference 194: note = a, c, u, g, unknown, or other
  misc_difference 195: note = a, c, u, g, unknown, or other
  misc_difference 196: note = a, c, u, g, unknown, or other
  misc_difference 197: note = a, c, u, g, unknown, or other
  misc_difference 198: note = a, c, u, g, unknown, or other
  misc_difference 201: note = a, c, u, g, unknown, or other
  misc_difference 203: note = a, c, u, g, unknown, or other
  misc_difference 204: note = a, c, u, g, unknown, or other
  misc_difference 209: note = a, c, u, g, unknown, or other
  misc_difference 210: note = a, c, u, g, unknown, or other
  misc_difference 211: note = a, c, u, g, unknown, or other
  misc_difference 213: note = a, c, u, g, unknown, or other
  misc_difference 215: note = a, c, u, g, unknown, or other
rnnnnrrcgytgcggnnyngycgtagcgtynnrgrggyccgrygggctggctcycnnnycnnctgccgrycnnnnrnrgyctggcttnnnancgangtgccrgcyygycggryctygccgyggcgtggctcrraagaggygcgancgcyrnynnnycygraatyaggcrtgcccgccrcggtcynnnynnnnnnnnnnrrnrnnggrgnnnrnynrtgryrgcrgtg

SEQ ID NO: 795557 - RNA, 413 nt, unidentified
  source 1..413: mol_type = unassigned RNA; note = d3f293
  misc_difference 4: note = a, c, u, g, unknown, or other
  misc_difference 5: note = a, c, u, g, unknown, or other
  misc_difference 6: note = a, c, u, g, unknown, or other
  misc_difference 9: note = a, c, u, g, unknown, or other
  misc_difference 10: note = a, c, u, g, unknown, or other
  misc_difference 15: note = a, c, u, g, unknown, or other
  misc_difference 16: note = a, c, u, g, unknown, or other
  misc_difference 17: note = a, c, u, g, unknown, or other
  misc_difference 18: note = a, c, u, g, unknown, or other
  misc_difference 25: note = a, c, u, g, unknown, or other
  misc_difference 27: note = a, c, u, g, unknown, or other
  misc_difference 28: note = a, c, u, g, unknown, or other
  misc_difference 37: note = a, c, u, g, unknown, or other
  misc_difference 39: note = a, c, u, g, unknown, or other
  misc_difference 40: note = a, c, u, g, unknown, or other
  misc_difference 42: note = a, c, u, g, unknown, or other
  misc_difference 43: note = a, c, u, g, unknown, or other
  misc_difference 44: note = a, c, u, g, unknown, or other
  misc_difference 45: note = a, c, u, g, unknown, or other
  misc_difference 46: note = a, c, u, g, unknown, or other
  misc_difference 50: note = a, c, u, g, unknown, or other
  misc_difference 51: note = a, c, u, g, unknown, or other
  misc_difference 52: note = a, c, u, g, unknown, or other
  misc_difference 56: note = a, c, u, g, unknown, or other
  misc_difference 57: note = a, c, u, g, unknown, or other
  misc_difference 58: note = a, c, u, g, unknown, or other
  misc_difference 59: note = a, c, u, g, unknown, or other
  misc_difference 60: note = a, c, u, g, unknown, or other
  misc_difference 61: note = a, c, u, g, unknown, or other
  misc_difference 63: note = a, c, u, g, unknown, or other
  misc_difference 64: note = a, c, u, g, unknown, or other
  misc_difference 65: note = a, c, u, g, unknown, or other
  misc_difference 66: note = a, c, u, g, unknown, or other
  misc_difference 67: note = a, c, u, g, unknown, or other
  misc_difference 68: note = a, c, u, g, unknown, or other
  misc_difference 69: note = a, c, u, g, unknown, or other
  misc_difference 70: note = a, c, u, g, unknown, or other
  misc_difference 71: note = a, c, u, g, unknown, or other
  misc_difference 72: note = a, c, u, g, unknown, or other
  misc_difference 73: note = a, c, u, g, unknown, or other
  misc_difference 74: note = a, c, u, g, unknown, or other
  misc_difference 75: note = a, c, u, g, unknown, or other
  misc_difference 76: note = a, c, u, g, unknown, or other
  misc_difference 77: note = a, c, u, g, unknown, or other
  misc_difference 80: note = a, c, u, g, unknown, or other
  misc_difference 82: note = a, c, u, g, unknown, or other
  misc_difference 84: note = a, c, u, g, unknown, or other
  misc_difference 85: note = a, c, u, g, unknown, or other
  misc_difference 88: note = a, c, u, g, unknown, or other
  misc_difference 92: note = a, c, u, g, unknown, or other
  misc_difference 93: note = a, c, u, g, unknown, or other
  misc_difference 94: note = a, c, u, g, unknown, or other
  misc_difference 96: note = a, c, u, g, unknown, or other
  misc_difference 97: note = a, c, u, g, unknown, or other
  misc_difference 98: note = a, c, u, g, unknown, or other
  misc_difference 100: note = a, c, u, g, unknown, or other
  misc_difference 101: note = a, c, u, g, unknown, or other
  misc_difference 102: note = a, c, u, g, unknown, or other
  misc_difference 103: note = a, c, u, g, unknown, or other
  misc_difference 104: note = a, c, u, g, unknown, or other
  misc_difference 107: note = a, c, u, g, unknown, or other
  misc_difference 108: note = a, c, u, g, unknown, or other
  misc_difference 109: note = a, c, u, g, unknown, or other
  misc_difference 110: note = a, c, u, g, unknown, or other
  misc_difference 111: note = a, c, u, g, unknown, or other
  misc_difference 112: note = a, c, u, g, unknown, or other
  misc_difference 115: note = a, c, u, g, unknown, or other
  misc_difference 116: note = a, c, u, g, unknown, or other
  misc_difference 117: note = a, c, u, g, unknown, or other
  misc_difference 118: note = a, c, u, g, unknown, or other
  misc_difference 120: note = a, c, u, g, unknown, or other
  misc_difference 123: note = a, c, u, g, unknown, or other
  misc_difference 124: note = a, c, u, g, unknown, or other
  misc_difference 125: note = a, c, u, g, unknown, or other
  misc_difference 126: note = a, c, u, g, unknown, or other
  misc_difference 127: note = a, c, u, g, unknown, or other
  misc_difference 128: note = a, c, u, g, unknown, or other
  misc_difference 129: note = a, c, u, g, unknown, or other
  misc_difference 130: note = a, c, u, g, unknown, or other
  misc_difference 132: note = a, c, u, g, unknown, or other
  misc_difference 141: note = a, c, u, g, unknown, or other
  misc_difference 142: note = a, c, u, g, unknown, or other
  misc_difference 144: note = a, c, u, g, unknown, or other
  misc_difference 146: note = a, c, u, g, unknown, or other
  misc_difference 150: note = a, c, u, g, unknown, or other
  misc_difference 151: note = a, c, u, g, unknown, or other
  misc_difference 152: note = a, c, u, g, unknown, or other
  misc_difference 155: note = a, c, u, g, unknown, or other
  misc_difference 156: note = a, c, u, g, unknown, or other
  misc_difference 157: note = a, c, u, g, unknown, or other
  misc_difference 158: note = a, c, u, g, unknown, or other
  misc_difference 159: note = a, c, u, g, unknown, or other
  misc_difference 160: note = a, c, u, g, unknown, or other
  misc_difference 161: note = a, c, u, g, unknown, or other
  misc_difference 162: note = a, c, u, g, unknown, or other
  misc_difference 163: note = a, c, u, g, unknown, or other
  misc_difference 164: note = a, c, u, g, unknown, or other
  misc_difference 165: note = a, c, u, g, unknown, or other
  misc_difference 166: note = a, c, u, g, unknown, or other
  misc_difference 167: note = a, c, u, g, unknown, or other
  misc_difference 168: note = a, c, u, g, unknown, or other
  misc_difference 169: note = a, c, u, g, unknown, or other
  misc_difference 170: note = a, c, u, g, unknown, or other
  misc_difference 173: note = a, c, u, g, unknown, or other
  misc_difference 175: note = a, c, u, g, unknown, or other
  misc_difference 177: note = a, c, u, g, unknown, or other
  misc_difference 179: note = a, c, u, g, unknown, or other
  misc_difference 180: note = a, c, u, g, unknown, or other
  misc_difference 181: note = a, c, u, g, unknown, or other
  misc_difference 184: note = a, c, u, g, unknown, or other
  misc_difference 186: note = a, c, u, g, unknown, or other
  misc_difference 187: note = a, c, u, g, unknown, or other
  misc_difference 197: note = a, c, u, g, unknown, or other
  misc_difference 198: note = a, c, u, g, unknown, or other
  misc_difference 200: note = a, c, u, g, unknown, or other
  misc_difference 206: note = a, c, u, g, unknown, or other
  misc_difference 207: note = a, c, u, g, unknown, or other
  misc_difference 208: note = a, c, u, g, unknown, or other
  misc_difference 209: note = a, c, u, g, unknown, or other
  misc_difference 210: note = a, c, u, g, unknown, or other
  misc_difference 211: note = a, c, u, g, unknown, or other
  misc_difference 219: note = a, c, u, g, unknown, or other
  misc_difference 220: note = a, c, u, g, unknown, or other
  misc_difference 221: note = a, c, u, g, unknown, or other
  misc_difference 222: note = a, c, u, g, unknown, or other
  misc_difference 225: note = a, c, u, g, unknown, or other
  misc_difference 226: note = a, c, u, g, unknown, or other
  misc_difference 227: note = a, c, u, g, unknown, or other
  misc_difference 228: note = a, c, u, g, unknown, or other
  misc_difference 229: note = a, c, u, g, unknown, or other
  misc_difference 230: note = a, c, u, g, unknown, or other
  misc_difference 231: note = a, c, u, g, unknown, or other
  misc_difference 232: note = a, c, u, g, unknown, or other
  misc_difference 233: note = a, c, u, g, unknown, or other
  misc_difference 234: note = a, c, u, g, unknown, or other
  misc_difference 235: note = a, c, u, g, unknown, or other
  misc_difference 237: note = a, c, u, g, unknown, or other
  misc_difference 239: note = a, c, u, g, unknown, or other
  misc_difference 242: note = a, c, u, g, unknown, or other
  misc_difference 243: note = a, c, u, g, unknown, or other
  misc_difference 244: note = a, c, u, g, unknown, or other
  misc_difference 245: note = a, c, u, g, unknown, or other
  misc_difference 246: note = a, c, u, g, unknown, or other
  misc_difference 247: note = a, c, u, g, unknown, or other
  misc_difference 251: note = a, c, u, g, unknown, or other
  misc_difference 256: note = a, c, u, g, unknown, or other
  misc_difference 260: note = a, c, u, g, unknown, or other
  misc_difference 261: note = a, c, u, g, unknown, or other
  misc_difference 268: note = a, c, u, g, unknown, or other
  misc_difference 271: note = a, c, u, g, unknown, or other
  misc_difference 274: note = a, c, u, g, unknown, or other
  misc_difference 275: note = a, c, u, g, unknown, or other
  misc_difference 276: note = a, c, u, g, unknown, or other
  misc_difference 285: note = a, c, u, g, unknown, or other
  misc_difference 286: note = a, c, u, g, unknown, or other
  misc_difference 287: note = a, c, u, g, unknown, or other
  misc_difference 292: note = a, c, u, g, unknown, or other
  misc_difference 293: note = a, c, u, g, unknown, or other
  misc_difference 294: note = a, c, u, g, unknown, or other
  misc_difference 295: note = a, c, u, g, unknown, or other
  misc_difference 296: note = a, c, u, g, unknown, or other
  misc_difference 297: note = a, c, u, g, unknown, or other
  misc_difference 298: note = a, c, u, g, unknown, or other
  misc_difference 299: note = a, c, u, g, unknown, or other
  misc_difference 300: note = a, c, u, g, unknown, or other
  misc_difference 301: note = a, c, u, g, unknown, or other
  misc_difference 302: note = a, c, u, g, unknown, or other
  misc_difference 303: note = a, c, u, g, unknown, or other
  misc_difference 304: note = a, c, u, g, unknown, or other
  misc_difference 309: note = a, c, u, g, unknown, or other
  misc_difference 310: note = a, c, u, g, unknown, or other
  misc_difference 311: note = a, c, u, g, unknown, or other
  misc_difference 312: note = a, c, u, g, unknown, or other
  misc_difference 313: note = a, c, u, g, unknown, or other
  misc_difference 315: note = a, c, u, g, unknown, or other
  misc_difference 316: note = a, c, u, g, unknown, or other
  misc_difference 317: note = a, c, u, g, unknown, or other
  misc_difference 318: note = a, c, u, g, unknown, or other
  misc_difference 319: note = a, c, u, g, unknown, or other
  misc_difference 320: note = a, c, u, g, unknown, or other
  misc_difference 321: note = a, c, u, g, unknown, or other
  misc_difference 325: note = a, c, u, g, unknown, or other
  misc_difference 326: note = a, c, u, g, unknown, or other
  misc_difference 328: note = a, c, u, g, unknown, or other
  misc_difference 329: note = a, c, u, g, unknown, or other
  misc_difference 332: note = a, c, u, g, unknown, or other
  misc_difference 335: note = a, c, u, g, unknown, or other
  misc_difference 337: note = a, c, u, g, unknown, or other
  misc_difference 338: note = a, c, u, g, unknown, or other
  misc_difference 340: note = a, c, u, g, unknown, or other
  misc_difference 341: note = a, c, u, g, unknown, or other
  misc_difference 350: note = a, c, u, g, unknown, or other
  misc_difference 353: note = a, c, u, g, unknown, or other
  misc_difference 355: note = a, c, u, g, unknown, or other
  misc_difference 356: note = a, c, u, g, unknown, or other
  misc_difference 357: note = a, c, u, g, unknown, or other
  misc_difference 358: note = a, c, u, g, unknown, or other
  misc_difference 359: note = a, c, u, g, unknown, or other
  misc_difference 360: note = a, c, u, g, unknown, or other
  misc_difference 362: note = a, c, u, g, unknown, or other
  misc_difference 365: note = a, c, u, g, unknown, or other
  misc_difference 372: note = a, c, u, g, unknown, or other
  misc_difference 373: note = a, c, u, g, unknown, or other
  misc_difference 374: note = a, c, u, g, unknown, or other
  misc_difference 375: note = a, c, u, g, unknown, or other
  misc_difference 376: note = a, c, u, g, unknown, or other
  misc_difference 377: note = a, c, u, g, unknown, or other
  misc_difference 382: note = a, c, u, g, unknown, or other
  misc_difference 383: note = a, c, u, g, unknown, or other
  misc_difference 384: note = a, c, u, g, unknown, or other
  misc_difference 391: note = a, c, u, g, unknown, or other
  misc_difference 392: note = a, c, u, g, unknown, or other
  misc_difference 393: note = a, c, u, g, unknown, or other
  misc_difference 394: note = a, c, u, g, unknown, or other
  misc_difference 396: note = a, c, u, g, unknown, or other
  misc_difference 397: note = a, c, u, g, unknown, or other
  misc_difference 398: note = a, c, u, g, unknown, or other
  misc_difference 399: note = a, c, u, g, unknown, or other
  misc_difference 400: note = a, c, u, g, unknown, or other
  misc_difference 401: note = a, c, u, g, unknown, or other
  misc_difference 402: note = a, c, u, g, unknown, or other
  misc_difference 403: note = a, c, u, g, unknown, or other
  misc_difference 404: note = a, c, u, g, unknown, or other
  misc_difference 405: note = a, c, u, g, unknown, or other
  misc_difference 406: note = a, c, u, g, unknown, or other
  misc_difference 407: note = a, c, u, g, unknown, or other
  misc_difference 409: note = a, c, u, g, unknown, or other
  misc_difference 410: note = a, c, u, g, unknown, or other
  misc_difference 411: note = a, c, u, g, unknown, or other
  misc_difference 412: note = a, c, u, g, unknown, or other
  misc_difference 413: note = a, c, u, g, unknown, or other
trrnnnrrnnrgrrnnnnyragcynrnngyyyaactngnnynnnnnrrgnnnrrcnnnnnngnnnnnnnnnnnnnnntgnrnynngrnyrynnnrnnnynnnnnrynnnnnnyynnnnrncynnnnnnnnyngatyggrynnynrnyyynnnyynnnnnnnnnnnnnnnnyrnynrnynnnyrnrnncygcycyyynncngarcynnnnnnyaacyggnnnnrynnnnnnnnnnnynrnccnnnnnntganyrrrncrgnnyrrrggnacnrrnnnrtttctrgnnngyrrnnnnnnnnnnnnnyyrcnnnnnynnnnnnnyrrnnrnnranycnynnynnrygyyyggngcngnnnnnnrnyynryrccrnnnnnngrrrnnnrgyyrgnnnnynnnnnnnnnnnnynnnnn

SEQ ID NO: 795558 - RNA, 257 nt, unidentified
  source 1..257: mol_type = unassigned RNA; note = 02c14f
  misc_difference 1: note = a, c, u, g, unknown, or other
  misc_difference 3: note = a, c, u, g, unknown, or other
  misc_difference 4: note = a, c, u, g, unknown, or other
  misc_difference 6: note = a, c, u, g, unknown, or other
  misc_difference 10: note = a, c, u, g, unknown, or other
  misc_difference 11: note = a, c, u, g, unknown, or other
  misc_difference 12: note = a, c, u, g, unknown, or other
  misc_difference 13: note = a, c, u, g, unknown, or other
  misc_difference 14: note = a, c, u, g, unknown, or other
  misc_difference 15: note = a, c, u, g, unknown, or other
  misc_difference 16: note = a, c, u, g, unknown, or other
  misc_difference 18: note = a, c, u, g, unknown, or other
  misc_difference 19: note = a, c, u, g, unknown, or other
  misc_difference 20: note = a, c, u, g, unknown, or other
  misc_difference 21: note = a, c, u, g, unknown, or other
  misc_difference 22: note = a, c, u, g, unknown, or other
  misc_difference 33: note = a, c, u, g, unknown, or other
  misc_difference 37: note = a, c, u, g, unknown, or other
  misc_difference 38: note = a, c, u, g, unknown, or other
  misc_difference 39: note = a, c, u, g, unknown, or other
  misc_difference 40: note = a, c, u, g, unknown, or other
  misc_difference 45: note = a, c, u, g, unknown, or other
  misc_difference 46: note = a, c, u, g, unknown, or other
  misc_difference 48: note = a, c, u, g, unknown, or other
  misc_difference 49: note = a, c, u, g, unknown, or other
  misc_difference 50: note = a, c, u, g, unknown, or other
  misc_difference 51: note = a, c, u, g, unknown, or other
  misc_difference 52: note = a, c, u, g, unknown, or other
  misc_difference 53: note = a, c, u, g, unknown, or other
  misc_difference 56: note = a, c, u, g, unknown, or other
  misc_difference 59: note = a, c, u, g, unknown, or other
  misc_difference 63: note = a, c, u, g, unknown, or other
  misc_difference 65: note = a, c, u, g, unknown, or other
  misc_difference 66: note = a, c, u, g, unknown, or other
  misc_difference 67: note = a, c, u, g, unknown, or other
  misc_difference 68: note = a, c, u, g, unknown, or other
  misc_difference 69: note = a, c, u, g, unknown, or other
  misc_difference 70: note = a, c, u, g, unknown, or other
  misc_difference 71: note = a, c, u, g, unknown, or other
  misc_difference 73: note = a, c, u, g, unknown, or other
  misc_difference 79: note = a, c, u, g, unknown, or other
  misc_difference 82: note = a, c, u, g, unknown, or other
  misc_difference 83: note = a, c, u, g, unknown, or other
  misc_difference 84: note = a, c, u, g, unknown, or other
  misc_difference 85: note = a, c, u, g, unknown, or other
  misc_difference 86: note = a, c, u, g, unknown, or other
  misc_difference 91: note = a, c, u, g, unknown, or other
  misc_difference 92: note = a, c, u, g, unknown, or other
  misc_difference 93: note = a, c, u, g, unknown, or other
  misc_difference 94: note = a, c, u, g, unknown, or other
  misc_difference 95: note = a, c, u, g, unknown, or other
  misc_difference 96: note = a, c, u, g, unknown, or other
  misc_difference 97: note = a, c, u, g, unknown, or other
  misc_difference 98: note = a, c, u, g, unknown, or other
  misc_difference 99: note = a, c, u, g, unknown, or other
  misc_difference 101: note = a, c, u, g, unknown, or other
  misc_difference 104: note = a, c, u, g, unknown, or other
  misc_difference 106: note = a, c, u, g, unknown, or other
  misc_difference 107: note = a, c, u, g, unknown, or other
  misc_difference 116: note = a, c, u, g, unknown, or other
  misc_difference 119: note = a, c, u, g, unknown, or other
  misc_difference 121: note = a, c, u, g, unknown, or other
  misc_difference 126: note = a, c, u, g, unknown, or other
  misc_difference 131: note = a, c, u, g, unknown, or other
  misc_difference 134: note = a, c, u, g, unknown, or other
  misc_difference 136: note = a, c, u, g, unknown, or other
  misc_difference 139: note = a, c, u, g, unknown, or other
  misc_difference 140: note = a, c, u, g, unknown, or other
  misc_difference 143: note = a, c, u, g, unknown, or other
  misc_difference 144: note = a, c, u, g, unknown, or other
  misc_difference 160: note = a, c, u, g, unknown, or other
  misc_difference 161: note = a, c, u, g, unknown, or other
  misc_difference 164: note = a, c, u, g, unknown, or other
  misc_difference 167: note = a, c, u, g, unknown, or other
  misc_difference 175: note = a, c, u, g, unknown, or other
  misc_difference 176: note = a, c, u, g, unknown, or other
  misc_difference 177: note = a, c, u, g, unknown, or other
  misc_difference 184: note = a, c, u, g, unknown, or other
  misc_difference 185: note = a, c, u, g, unknown, or other
  misc_difference 186: note = a, c, u, g, unknown, or other
  misc_difference 187: note = a, c, u, g, unknown, or other
  misc_difference 190: note = a, c, u, g, unknown, or other
  misc_difference 191: note = a, c, u, g, unknown, or other
  misc_difference 192: note = a, c, u, g, unknown, or other
  misc_difference 193: note = a, c, u, g, unknown, or other
  misc_difference 194: note = a, c, u, g, unknown, or other
  misc_difference 195: note = a, c, u, g, unknown, or other
  misc_difference 196: note = a, c, u, g, unknown, or other
  misc_difference 197: note = a, c, u, g, unknown, or other
  misc_difference 198: note = a, c, u, g, unknown, or other
  misc_difference 199: note = a, c, u, g, unknown, or other
  misc_difference 200: note = a, c, u, g, unknown, or other
  misc_difference 201: note = a, c, u, g, unknown, or other
  misc_difference 202: note = a, c, u, g, unknown, or other
  misc_difference 205: note = a, c, u, g, unknown, or other
  misc_difference 206: note = a, c, u, g, unknown, or other
  misc_difference 207: note = a, c, u, g, unknown, or other
  misc_difference 211: note = a, c, u, g, unknown, or other
  misc_difference 214: note = a, c, u, g, unknown, or other
  misc_difference 215: note = a, c, u, g, unknown, or other
  misc_difference 216: note = a, c, u, g, unknown, or other
  misc_difference 217: note = a, c, u, g, unknown, or other
  misc_difference 218: note = a, c, u, g, unknown, or other
  misc_difference 219: note = a, c, u, g, unknown, or other
  misc_difference 220: note = a, c, u, g, unknown, or other
  misc_difference 222: note = a, c, u, g, unknown, or other
  misc_difference 223: note = a, c, u, g, unknown, or other
  misc_difference 225: note = a, c, u, g, unknown, or other
  misc_difference 227: note = a, c, u, g, unknown, or other
  misc_difference 231: note = a, c, u, g, unknown, or other
  misc_difference 233: note = a, c, u, g, unknown, or other
  misc_difference 234: note = a, c, u, g, unknown, or other
  misc_difference 235: note = a, c, u, g, unknown, or other
  misc_difference 236: note = a, c, u, g, unknown, or other
  misc_difference 237: note = a, c, u, g, unknown, or other
  misc_difference 238: note = a, c, u, g, unknown, or other
  misc_difference 239: note = a, c, u, g, unknown, or other
  misc_difference 240: note = a, c, u, g, unknown, or other
  misc_difference 241: note = a, c, u, g, unknown, or other
  misc_difference 245: note = a, c, u, g, unknown, or other
  misc_difference 250: note = a, c, u, g, unknown, or other
  misc_difference 252: note = a, c, u, g, unknown, or other
  misc_difference 253: note = a, c, u, g, unknown, or other
  misc_difference 254: note = a, c, u, g, unknown, or other
  misc_difference 256: note = a, c, u, g, unknown, or other
  misc_difference 257: note = a, c, u, g, unknown, or other
nynnynccgnnnnnnnynnnnnycgargycgynggrnnnnayycnngnnnnnnytntgnrcrncnnnnnnngnyrygcncgnnnnnagacnnnnnnnnnrngrnrnnycyrgccgnarnrncgrrntgcrnyrncncrnnrcnngcgratatyarrytgnnrrncgngcgtcgrnnngacacgnnnncrnnnnnnnnnnnnngrnnnrrrnyrnnnnnnnrnncnrnyyynrnnnnnnnnnrgrnyygrnynnnynn

SEQ ID NO: 795559 - RNA, 235 nt, unidentified
  source 1..235: mol_type = unassigned RNA; note = a532a4
  misc_difference 3: note = a, c, u, g, unknown, or other
  misc_difference 4: note = a, c, u, g, unknown, or other
  misc_difference 5: note = a, c, u, g, unknown, or other
  misc_difference 8: note = a, c, u, g, unknown, or other
  misc_difference 9: note = a, c, u, g, unknown, or other
  misc_difference 10: note = a, c, u, g, unknown, or other
  misc_difference 11: note = a, c, u, g, unknown, or other
  misc_difference 12: note = a, c, u, g, unknown, or other
  misc_difference 21: note = a, c, u, g, unknown, or other
  misc_difference 22: note = a, c, u, g, unknown, or other
  misc_difference 28: note = a, c, u, g, unknown, or other
  misc_difference 29: note = a, c, u, g, unknown, or other
  misc_difference 30: note = a, c, u, g, unknown, or other
  misc_difference 31: note = a, c, u, g, unknown, or other
  misc_difference 33: note = a, c, u, g, unknown, or other
  misc_difference 43: note = a, c, u, g, unknown, or other
  misc_difference 44: note = a, c, u, g, unknown, or other
  misc_difference 45: note = a, c, u, g, unknown, or other
  misc_difference 46: note = a, c, u, g, unknown, or other
  misc_difference 47: note = a, c, u, g, unknown, or other
  misc_difference 51: note = a, c, u, g, unknown, or other
  misc_difference 58: note = a, c, u, g, unknown, or other
  misc_difference 63: note = a, c, u, g, unknown, or other
  misc_difference 65: note = a, c, u, g, unknown, or other
  misc_difference 66: note = a, c, u, g, unknown, or other
  misc_difference 74: note = a, c, u, g, unknown, or other
  misc_difference 76: note = a, c, u, g, unknown, or other
  misc_difference 77: note = a, c, u, g, unknown, or other
  misc_difference 78: note = a, c, u, g, unknown, or other
  misc_difference 79: note = a, c, u, g, unknown, or other
  misc_difference 80: note = a, c, u, g, unknown, or other
  misc_difference 81: note = a, c, u, g, unknown, or other
  misc_difference 82: note = a, c, u, g, unknown, or other
  misc_difference 83: note = a, c, u, g, unknown, or other
  misc_difference 84: note = a, c, u, g, unknown, or other
  misc_difference 86: note = a, c, u, g, unknown, or other
  misc_difference 89: note = a, c, u, g, unknown, or other
  misc_difference 90: note = a, c, u, g, unknown, or other
  misc_difference 91: note = a, c, u, g, unknown, or other
  misc_difference 98: note = a, c, u, g, unknown, or other
  misc_difference 100: note = a, c, u, g, unknown, or other
  misc_difference 101: note = a, c, u, g, unknown, or other
  misc_difference 102: note = a, c, u, g, unknown, or other
  misc_difference 103: note = a, c, u, g, unknown, or other
  misc_difference 104: note = a, c, u, g, unknown, or other
  misc_difference 105: note = a, c, u, g, unknown, or other
  misc_difference 109: note = a, c, u, g, unknown, or other
  misc_difference 113: note = a, c, u, g, unknown, or other
  misc_difference 114: note = a, c, u, g, unknown, or other
  misc_difference 116: note = a, c, u, g, unknown, or other
  misc_difference 121: note = a, c, u, g, unknown, or other
  misc_difference 133: note = a, c, u, g, unknown, or other
  misc_difference 140: note = a, c, u, g, unknown, or other
  misc_difference 145: note = a, c, u, g, unknown, or other
  misc_difference 146: note = a, c, u, g, unknown, or other
  misc_difference 147: note = a, c, u, g, unknown, or other
  misc_difference 148: note = a, c, u, g, unknown, or other
  misc_difference 149: note = a, c, u, g, unknown, or other
  misc_difference 150: note = a, c, u, g, unknown, or other
  misc_difference 151: note = a, c, u, g, unknown, or other
  misc_difference 152: note = a, c, u, g, unknown, or other
  misc_difference 153: note = a, c, u, g, unknown, or other
  misc_difference 154: note = a, c, u, g, unknown, or other
  misc_difference 160: note = a, c, u, g, unknown, or other
  misc_difference 161: note = a, c, u, g, unknown, or other
  misc_difference 175: note = a, c, u, g, unknown, or other
  misc_difference 183: note = a, c, u, g, unknown, or other
  misc_difference 186: note = a, c, u, g, unknown, or other
  misc_difference 190: note = a, c, u, g, unknown, or other
  misc_difference 193: note = a, c, u, g, unknown, or other
  misc_difference 197: note = a, c, u, g, unknown, or other
  misc_difference 198: note = a, c, u, g, unknown, or other
  misc_difference 199: note = a, c, u, g, unknown, or other
  misc_difference 200: note = a, c, u, g, unknown, or other
  misc_difference 204: note = a, c, u, g, unknown, or other
  misc_difference 205: note = a, c, u, g, unknown, or other
  misc_difference 206: note = a, c, u, g, unknown, or other
  misc_difference 207: note = a, c, u, g, unknown, or other
  misc_difference 208: note = a, c, u, g, unknown, or other
  misc_difference 209: note = a, c, u, g, unknown, or other
  misc_difference 210: note = a, c, u, g, unknown, or other
  misc_difference 211: note = a, c, u, g, unknown, or other
  misc_difference 214: note = a, c, u, g, unknown, or other
  misc_difference 216: note = a, c, u, g, unknown, or other
  misc_difference 220: note = a, c, u, g, unknown, or other
  misc_difference 221: note = a, c, u, g, unknown, or other
  misc_difference 222: note = a, c, u, g, unknown, or other
  misc_difference 223: note = a, c, u, g, unknown, or other
  misc_difference 225: note = a, c, u, g, unknown, or other
  misc_difference 227: note = a, c, u, g, unknown, or other
  misc_difference 228: note = a, c, u, g, unknown, or other
yrnnnyrnnnnnrrrttgcrnnrgyrrnnnnrngygatgrcrnnnnnggtnrrrccrngryynrnnaarccygnrnnnnnnnnngnrcnnnragyycnynnnnnnratnrggnnynrrycngcgrayyycatnrrggccngcrgnnnnnnnnnncygcrnnraggccgrayayanrrcygcanycnryynrynrycnnnnyrynnnnnnnnyynynrcrnnnngnrnncgtycay

SEQ ID NO: 795560 - RNA, 166 nt, unidentified
  source 1..166: mol_type = unassigned RNA; note = 69f2b2
  misc_difference 1: note = a, c, u, g, unknown, or other
  misc_difference 2: note = a, c, u, g, unknown, or other
  misc_difference 11: note = a, c, u, g, unknown, or other
  misc_difference 14: note = a, c, u, g, unknown, or other
  misc_difference 25: note = a, c, u, g, unknown, or other
  misc_difference 26: note = a, c, u, g, unknown, or other
  misc_difference 30: note = a, c, u, g, unknown, or other
  misc_difference 33: note = a, c, u, g, unknown, or other
  misc_difference 34: note = a, c, u, g, unknown, or other
  misc_difference 35: note = a, c, u, g, unknown, or other
  misc_difference 42: note = a, c, u, g, unknown, or other
  misc_difference 43: note = a, c, u, g, unknown, or other
  misc_difference 44: note = a, c, u, g, unknown, or other
  misc_difference 45: note = a, c, u, g, unknown, or other
  misc_difference 46: note = a, c, u, g, unknown, or other
  misc_difference 47: note = a, c, u, g, unknown, or other
  misc_difference 48: note = a, c, u, g, unknown, or other
  misc_difference 51: note = a, c, u, g, unknown, or other
  misc_difference 52: note = a, c, u, g, unknown, or other
  misc_difference 54: note = a, c, u, g, unknown, or other
  misc_difference 55: note = a, c, u, g, unknown, or other
  misc_difference 58: note = a, c, u, g, unknown, or other
  misc_difference 59: note = a, c, u, g, unknown, or other
  misc_difference 64: note = a, c, u, g, unknown, or other
  misc_difference 67: note = a, c, u, g, unknown, or other
  misc_difference 68: note = a, c, u, g, unknown, or other
  misc_difference 69: note = a, c, u, g, unknown, or other
  misc_difference 70: note = a, c, u, g, unknown, or other
  misc_difference 71: note = a, c, u, g, unknown, or other
  misc_difference 72: note = a, c, u, g, unknown, or other
  misc_difference 77: note = a, c, u, g, unknown, or other
  misc_difference 81: note = a, c, u, g, unknown, or other
  misc_difference 82: note = a, c, u, g, unknown, or other
  misc_difference 85: note = a, c, u, g, unknown, or other
  misc_difference 89: note = a, c, u, g, unknown, or other
  misc_difference 96: note = a, c, u, g, unknown, or other
  misc_difference 108: note = a, c, u, g, unknown, or other
  misc_difference 116: note = a, c, u, g, unknown, or other
  misc_difference 118: note = a, c, u, g, unknown, or other
  misc_difference 120: note = a, c, u, g, unknown, or other
  misc_difference 128: note = a, c, u, g, unknown, or other
  misc_difference 129: note = a, c, u, g, unknown, or other
  misc_difference 131: note = a, c, u, g, unknown, or other
  misc_difference 142: note = a, c, u, g, unknown, or other
  misc_difference 152: note = a, c, u, g, unknown, or other
  misc_difference 155: note = a, c, u, g, unknown, or other
  misc_difference 156: note = a, c, u, g, unknown, or other
  misc_difference 159: note = a, c, u, g, unknown, or other
  misc_difference 160: note = a, c, u, g, unknown, or other
  misc_difference 161: note = a, c, u, g, unknown, or other
  misc_difference 162: note = a, c, u, g, unknown, or other
  misc_difference 163: note = a, c, u, g, unknown, or other
  misc_difference 164: note = a, c, u, g, unknown, or other
  misc_difference 165: note = a, c, u, g, unknown, or other
  misc_difference 166: note = a, c, u, g, unknown, or other
nntgatgrcrnrynggtyrrrccgnnrrynrrnnnarccygnnnnnnnyynngnncynnraryncgnnnnnntgatnrggnnyynryyngcgraynycatcarggccngcggyyrnrnrnrcyrcrynnrnaggccgrayanaygryygcanyynnyynnnnnnnn

SEQ ID NO: 795561 - RNA, 213 nt, unidentified
  source 1..213: mol_type = unassigned RNA; note = 05515f
  misc_difference 1: note = a, c, u, g, unknown, or other
  misc_difference 2: note = a, c, u, g, unknown, or other
  misc_difference 3: note = a, c, u, g, unknown, or other
  misc_difference 5: note = a, c, u, g, unknown, or other
  misc_difference 10: note = a, c, u, g, unknown, or other
  misc_difference 11: note = a, c, u, g, unknown, or other
  misc_difference 16: note = a, c, u, g, unknown, or other
  misc_difference 17: note = a, c, u, g, unknown, or other
  misc_difference 18: note = a, c, u, g, unknown, or other
  misc_difference 19: note = a, c, u, g, unknown, or other
  misc_difference 20: note = a, c, u, g, unknown, or other
  misc_difference 21: note = a, c, u, g, unknown, or other
  misc_difference 22: note = a, c, u, g, unknown, or other
  misc_difference 23: note = a, c, u, g, unknown, or other
  misc_difference 24: note = a, c, u, g, unknown, or other
  misc_difference 25: note = a, c, u, g, unknown, or other
  misc_difference 31: note = a, c, u, g, unknown, or other
  misc_difference 32: note = a, c, u, g, unknown, or other
  misc_difference 34: note = a, c, u, g, unknown, or other
  misc_difference 38: note = a, c, u, g, unknown, or other
  misc_difference 42: note = a, c, u, g, unknown, or other
  misc_difference 44: note = a, c, u, g, unknown, or other
  misc_difference 49: note = a, c, u, g, unknown, or other
  misc_difference 50: note = a, c, u, g, unknown, or other
  misc_difference 54: note = a, c, u, g, unknown, or other
  misc_difference 56: note = a, c, u, g, unknown, or other
  misc_difference 57: note = a, c, u, g, unknown, or other
  misc_difference 58: note = a, c, u, g, unknown, or other
  misc_difference 65: note = a, c, u, g, unknown, or other
  misc_difference 66: note = a, c, u, g, unknown, or other
  misc_difference 67: note = a, c, u, g, unknown, or other
  misc_difference 68: note = a, c, u, g, unknown, or other
  misc_difference 69: note = a, c, u, g, unknown, or other
  misc_difference 70: note = a, c, u, g, unknown, or other
  misc_difference 71: note = a, c, u, g, unknown, or other
  misc_difference 72: note = a, c, u, g, unknown, or other
  misc_difference 73: note = a, c, u, g, unknown, or other
  misc_difference 74: note = a, c, u, g, unknown, or other
  misc_difference 75: note = a, c, u, g, unknown, or other
  misc_difference 77: note = a, c, u, g, unknown, or other
  misc_difference 80: note = a, c, u, g, unknown, or other
  misc_difference 81: note = a, c, u, g, unknown, or other
  misc_difference 82: note = a, c, u, g, unknown, or other
  misc_difference 86: note = a, c, u, g, unknown, or other
  misc_difference 87: note = a, c, u, g, unknown, or other
  misc_difference 90: note = a, c, u, g, unknown, or other
  misc_difference 91: note = a, c, u, g, unknown, or other
  misc_difference 92: note = a, c, u, g, unknown, or other
  misc_difference 93: note = a, c, u, g, unknown, or other
  misc_difference 94: note = a, c, u, g, unknown, or other
  misc_difference 95: note = a, c, u, g, unknown, or other
  misc_difference 96: note = a, c, u, g, unknown, or other
  misc_difference 100: note = a, c, u, g, unknown, or other
  misc_difference 104: note = a, c, u, g, unknown, or other
  misc_difference 105: note = a, c, u, g, unknown, or other
  misc_difference 107: note = a, c, u, g, unknown, or other
  misc_difference 111: note = a, c, u, g, unknown, or other
  misc_difference 112: note = a, c, u, g, unknown, or other
  misc_difference 118: note = a, c, u, g, unknown, or other
  misc_difference 119: note = a, c, u, g, unknown, or other
  misc_difference 126: note = a, c, u, g, unknown, or other
  misc_difference 131: note = a, c, u, g, unknown, or other
  misc_difference 133: note = a, c, u, g, unknown, or other
  misc_difference 136: note = a, c, u, g, unknown, or other
  misc_difference 137: note = a, c, u, g, unknown, or other
  misc_difference 138: note = a, c, u, g, unknown, or other
  misc_difference 139: note = a, c, u, g, unknown, or other
  misc_difference 140: note = a, c, u, g, unknown, or other
  misc_difference 142: note = a, c, u, g, unknown, or other
  misc_difference 143: note = a, c, u, g, unknown, or other
  misc_difference 146: note = a, c, u, g, unknown, or other
  misc_difference 149: note = a, c, u, g, unknown, or other
  misc_difference 150: note = a, c, u, g, unknown, or other
  misc_difference 151: note = a, c, u, g, unknown, or other
  misc_difference 163: note = a, c, u, g, unknown, or other
  misc_difference 165: note = a, c, u, g, unknown, or other
  misc_difference 167: note = a, c, u, g, unknown, or other
  misc_difference 168: note = a, c, u, g, unknown, or other
  misc_difference 176: note = a, c, u, g, unknown, or other
  misc_difference 180: note = a, c, u, g, unknown, or other
  misc_difference 181: note = a, c, u, g, unknown, or other
  misc_difference 182: note = a, c, u, g, unknown, or other
  misc_difference 183: note = a, c, u, g, unknown, or other
  misc_difference 188: note = a, c, u, g, unknown, or other
  misc_difference 189: note = a, c, u, g, unknown, or other
  misc_difference 192: note = a, c, u, g, unknown, or other
  misc_difference 193: note = a, c, u, g, unknown, or other
  misc_difference 194: note = a, c, u, g, unknown, or other
  misc_difference 195: note = a, c, u, g, unknown, or other
  misc_difference 196: note = a, c, u, g, unknown, or other
  misc_difference 197: note = a, c, u, g, unknown, or other
  misc_difference 198: note = a, c, u, g, unknown, or other
  misc_difference 199: note = a, c, u, g, unknown, or other
  misc_difference 200: note = a, c, u, g, unknown, or other
  misc_difference 203: note = a, c, u, g, unknown, or other
  misc_difference 206: note = a, c, u, g, unknown, or other
  misc_difference 207: note = a, c, u, g, unknown, or other
  misc_difference 208: note = a, c, u, g, unknown, or other
  misc_difference 209: note = a, c, u, g, unknown, or other
  misc_difference 210: note = a, c, u, g, unknown, or other
  misc_difference 211: note = a, c, u, g, unknown, or other
nnnrnttgynnrrrynnnnnnnnnntratgnnrnraynggtnrnrccgnnryynrnnnarccygnnnnnnnnnnngnrynnnrarnncgnnnnnnnraynrggnnynrrynngcgrannycatyrnggccngnrrnnnnnrnncyncrnnnraggccgrayrnanrnnygcaryynryynnnnryyrnnrynnnnnnnnnctngcnnnnnnrg

SEQ ID NO: 795562 - RNA, 216 nt, unidentified
  source 1..216: mol_type = unassigned RNA; note = 043f08
  misc_difference 1: note = a, c, u, g, unknown, or other
  misc_difference 2: note = a, c, u, g, unknown, or other
  misc_difference 3: note = a, c, u, g, unknown, or other
  misc_difference 8: note = a, c, u, g, unknown, or other
  misc_difference 9: note = a, c, u, g, unknown, or other
  misc_difference 10: note = a, c, u, g, unknown, or other
  misc_difference 12: note = a, c, u, g, unknown, or other
  misc_difference 20: note = a, c, u, g, unknown, or other
  misc_difference 22: note = a, c, u, g, unknown, or other
  misc_difference 23: note = a, c, u, g, unknown, or other
  misc_difference 24: note = a, c, u, g, unknown, or other
  misc_difference 26: note = a, c, u, g, unknown, or other
  misc_difference 27: note = a, c, u, g, unknown, or other
  misc_difference 28: note = a, c, u, g, unknown, or other
  misc_difference 29: note = a, c, u, g, unknown, or other
  misc_difference 31: note = a, c, u, g, unknown, or other
  misc_difference 37: note = a, c, u, g, unknown, or other
  misc_difference 38: note = a, c, u, g, unknown, or other
  misc_difference 39: note = a, c, u, g, unknown, or other
  misc_difference 41: note = a, c, u, g, unknown, or other
  misc_difference 47: note = a, c, u, g, unknown, or other
  misc_difference 49: note = a, c, u, g, unknown, or other
  misc_difference 50: note = a, c, u, g, unknown, or other
  misc_difference 57: note = a, c, u, g, unknown, or other
  misc_difference 58: note = a, c, u, g, unknown, or other
  misc_difference 59: note = a, c, u, g, unknown, or other
  misc_difference 60: note = a, c, u, g, unknown, or other
  misc_difference 64: note = a, c, u, g, unknown, or other
  misc_difference 65: note = a, c, u, g, unknown, or other
  misc_difference 69: note = a, c, u, g, unknown, or other
  misc_difference 70: note = a, c, u, g, unknown, or other
  misc_difference 71: note = a, c, u, g, unknown, or other
  misc_difference 72: note = a, c, u, g, unknown, or other
  misc_difference 73: note = a, c, u, g, unknown, or other
  misc_difference 74: note = a, c, u, g, unknown, or other
  misc_difference 75: note = a, c, u, g, unknown, or other
  misc_difference 76: note = a, c, u, g, unknown, or other
  misc_difference 77: note = a, c, u, g, unknown, or other
  misc_difference 78: note = a, c, u, g, unknown, or other
  misc_difference 83: note = a, c, u, g, unknown, or other
  misc_difference 89: note = a, c, u, g, unknown, or other
  misc_difference 94: note = a, c, u, g, unknown, or other
  misc_difference 95: note = a, c, u, g, unknown, or other
  misc_difference 96: note = a, c, u, g, unknown, or other
  misc_difference 97: note = a, c, u, g, unknown, or other
  misc_difference 98: note = a, c, u, g, unknown, or other
  misc_difference 99: note = a, c, u, g, unknown, or other
  misc_difference 101: note = a, c, u, g, unknown, or other
  misc_difference 104: note = a, c, u, g, unknown, or other
  misc_difference 108: note = a, c, u, g, unknown, or other
  misc_difference 110: note = a, c, u, g, unknown, or other
  misc_difference 111: note = a, c, u, g, unknown, or other
  misc_difference 112: note = a, c, u, g, unknown, or other
  misc_difference 113: note = a, c, u, g, unknown, or other
  misc_difference 114: note = a, c, u, g, unknown, or other
  misc_difference 115: note = a, c, u, g, unknown, or other
  misc_difference 120: note = a, c, u, g, unknown, or other
  misc_difference 123: note = a, c, u, g, unknown, or other
  misc_difference 129: note = a, c, u, g, unknown, or other
  misc_difference 130: note = a, c, u, g, unknown, or other
  misc_difference 131: note = a, c, u, g, unknown, or other
  misc_difference 135: note = a, c, u, g, unknown, or other
  misc_difference 136: note = a, c, u, g, unknown, or other
  misc_difference 138: note = a, c, u, g, unknown, or other
  misc_difference 141: note = a, c, u, g, unknown, or other
  misc_difference 142: note = a, c, u, g, unknown, or other
  misc_difference 143: note = a, c, u, g, unknown, or other
  misc_difference 144: note = a, c, u, g, unknown, or other
  misc_difference 145: note = a, c, u, g, unknown, or other
  misc_difference 146: note = a, c, u, g, unknown, or other
  misc_difference 152: note = a, c, u, g, unknown, or other
  misc_difference 153: note = a, c, u, g, unknown, or other
  misc_difference 154: note = a, c, u, g, unknown, or other
  misc_difference 155: note = a, c, u, g, unknown, or other
  misc_difference 156: note = a, c, u, g, unknown, or other
  misc_difference 170: note = a, c, u, g, unknown, or other
  misc_difference 171: note = a, c, u, g, unknown, or other
  misc_difference 172: note = a, c, u, g, unknown, or other
  misc_difference 181: note = a, c, u, g, unknown, or other
  misc_difference 182: note = a, c, u, g, unknown, or other
  misc_difference 183: note = a, c, u, g, unknown, or other
  misc_difference 185: note = a, c, u, g, unknown, or other
  misc_difference 187: note = a, c, u, g, unknown, or other
  misc_difference 192: note = a, c, u, g, unknown, or other
  misc_difference 193: note = a, c, u, g, unknown, or other
  misc_difference 194: note = a, c, u, g, unknown, or other
  misc_difference 196: note = a, c, u, g, unknown, or other
  misc_difference 198: note = a, c, u, g, unknown, or other
  misc_difference 199: note = a, c, u, g, unknown, or other
  misc_difference 207: note = a, c, u, g, unknown, or other
  misc_difference 208: note = a, c, u, g, unknown, or other
  misc_difference 209: note = a, c, u, g, unknown, or other
  misc_difference 210: note = a, c, u, g, unknown, or other
  misc_difference 211: note = a, c, u, g, unknown, or other
  misc_difference 214: note = a, c, u, g, unknown, or other
  misc_difference 215: note = a, c, u, g, unknown, or other
  misc_difference 216: note = a, c, u, g, unknown, or other
nnnyrycnnnrnytgcgrrnrnnnrnnnnrngatgrnnnrnyrgyynrnncggcrynnnnrranncygnnnnnnnnnnyggcnyyyrangycgnnnnnntnrtnagrnynnnnnngygcnrrnyycatnnnggcnngnrrnnnnnnyyycrnnnnnagrccggatayatnnnygcarrcynnnynrncryynnnrnynncttgcrrnnnnngrnnn

SEQ ID NO: 795563 - RNA, 183 nt, unidentified
  source 1..183: mol_type = unassigned RNA; note = 1bccb7
  misc_difference 1: note = a, c, u, g, unknown, or other
  misc_difference 3: note = a, c, u, g, unknown, or other
  misc_difference 4: note = a, c, u, g, unknown, or other
  misc_difference 5: note = a, c, u, g, unknown, or other
  misc_difference 6: note = a, c, u, g, unknown, or other
  misc_difference 9: note = a, c, u, g, unknown, or other
  misc_difference 10: note = a, c, u, g, unknown, or other
  misc_difference 11: note = a, c, u, g, unknown, or other
  misc_difference 12: note = a, c, u, g, unknown, or other
  misc_difference 13: note = a, c, u, g, unknown, or other
  misc_difference 14: note = a, c, u, g, unknown, or other
  misc_difference 15: note = a, c, u, g, unknown, or other
  misc_difference 16: note = a, c, u, g, unknown, or other
  misc_difference 17: note = a, c, u, g, unknown, or other
  misc_difference 20: note = a, c, u, g, unknown, or other
  misc_difference 21: note = a, c, u, g, unknown, or other
  misc_difference 22: note = a, c, u, g, unknown, or other
  misc_difference 23: note = a, c, u, g, unknown, or other
  misc_difference 24: note = a, c, u, g, unknown, or other
  misc_difference 25: note = a, c, u, g, unknown, or other
  misc_difference 26: note = a, c, u, g, unknown, or other
  misc_difference 27: note = a, c, u, g, unknown, or other
  misc_difference 31: note = a, c, u, g, unknown, or other
  misc_difference 40: note = a, c, u, g, unknown, or other
  misc_difference 41: note = a, c, u, g, unknown, or other
  misc_difference 49: note = a, c, u, g, unknown, or other
  misc_difference 50: note = a, c, u, g, unknown, or other
  misc_difference 51: note = a, c, u, g, unknown, or other
  misc_difference 52: note = a, c, u, g, unknown, or other
  misc_difference 53: note = a, c, u, g, unknown, or other
  misc_difference 54: note = a, c, u, g, unknown, or other
  misc_difference 61: note = a, c, u, g, unknown, or other
  misc_difference 62: note = a, c, u, g, unknown, or other
  misc_difference 64: note = a, c, u, g, unknown, or other
  misc_difference 68: note = a, c, u, g, unknown, or other
  misc_difference 69: note = a, c, u, g, unknown, or other
  misc_difference 74: note = a, c, u, g, unknown, or other
  misc_difference 75: note = a, c, u, g, unknown, or other
  misc_difference 76: note = a, c, u, g, unknown, or other
  misc_difference 77: note = a, c, u, g, unknown, or other
  misc_difference 78: note = a, c, u, g, unknown, or other
  misc_difference 82: note = a, c, u, g, unknown, or other
  misc_difference 86: note = a, c, u, g, unknown, or other
  misc_difference 90: note = a, c, u, g, unknown, or other
  misc_difference 100: note = a, c, u, g, unknown, or other
  misc_difference 101: note = a, c, u, g, unknown, or other
  misc_difference 104: note = a, c, u, g, unknown, or other
  misc_difference 108: note = a, c, u, g, unknown, or other
  misc_difference 111: note = a, c, u, g, unknown, or other
  misc_difference 124: note = a, c, u, g, unknown, or other
  misc_difference 125: note = a, c, u, g, unknown, or other
  misc_difference 137: note = a, c, u, g, unknown, or other
  misc_difference 144: note = a, c, u, g, unknown, or other
  misc_difference 148: note = a, c, u, g, unknown, or other
  misc_difference 151: note = a, c, u, g, unknown, or other
  misc_difference 153: note = a, c, u, g, unknown, or other
  misc_difference 160: note = a, c, u, g, unknown, or other
  misc_difference 161: note = a, c, u, g, unknown, or other
  misc_difference 164: note = a, c, u, g, unknown, or other
  misc_difference 166: note = a, c, u, g, unknown, or other
  misc_difference 167: note = a, c, u, g, unknown, or other
  misc_difference 168: note = a, c, u, g, unknown, or other
  misc_difference 170: note = a, c, u, g, unknown, or other
  misc_difference 171: note = a, c, u, g, unknown, or other
  misc_difference 172: note = a, c, u, g, unknown, or other
  misc_difference 175: note = a, c, u, g, unknown, or other
  misc_difference 176: note = a, c, u, g, unknown, or other
  misc_difference 180: note = a, c, u, g, unknown, or other
  misc_difference 181: note = a, c, u, g, unknown, or other
  misc_difference 182: note = a, c, u, g, unknown, or other
  misc_difference 183: note = a, c, u, g, unknown, or other
nrnnnnyynnnnnnnnnrrnnnnnnnnyyanyytrryrrnnragraggnnnnnnyyytrgnnynyganncygynnnnnagtntctnccynyyrycargtnnarntcgnggnataacytggyrcnngayrccgyatynayaagrntganygnyncytgrynnyyntnnnynnnrannrrrnnnn

SEQ ID NO: 795564 - RNA, 218 nt, unidentified
  source 1..218: mol_type = unassigned RNA; note = b604a6
  misc_difference 1: note = a, c, u, g, unknown, or other
  misc_difference 2: note = a, c, u, g, unknown, or other
  misc_difference 3: note = a, c, u, g, unknown, or other
  misc_difference 4: note = a, c, u, g, unknown, or other
  misc_difference 7: note = a, c, u, g, unknown, or other
  misc_difference 10: note = a, c, u, g, unknown, or other
  misc_difference 11: note = a, c, u, g, unknown, or other
  misc_difference 17: note = a, c, u, g, unknown, or other
  misc_difference 19: note = a, c, u, g, unknown, or other
  misc_difference 20: note = a, c, u, g, unknown, or other
  misc_difference 22: note = a, c, u, g, unknown, or other
  misc_difference 23: note = a, c, u, g, unknown, or other
  misc_difference 25: note = a, c, u, g, unknown, or other
  misc_difference 26: note = a, c, u, g, unknown, or other
  misc_difference 32: note = a, c, u, g, unknown, or other
  misc_difference 33: note = a, c, u, g, unknown, or other
  misc_difference 34: note = a, c, u, g, unknown, or other
  misc_difference 36: note = a, c, u, g, unknown, or other
  misc_difference 37: note = a, c, u, g, unknown, or other
  misc_difference 38: note = a, c, u, g, unknown, or other
  misc_difference 45: note = a, c, u, g, unknown, or other
  misc_difference 48: note = a, c, u, g, unknown, or other
  misc_difference 56: note = a, c, u, g, unknown, or other
  misc_difference 57: note = a, c, u, g, unknown, or other
  misc_difference 58: note = a, c, u, g, unknown, or other
  misc_difference 65: note = a, c, u, g, unknown, or other
  misc_difference 66: note = a, c, u, g, unknown, or other
  misc_difference 67: note = a, c, u, g, unknown, or other
  misc_difference 68: note = a, c, u, g, unknown, or other
  misc_difference 69: note = a, c, u, g, unknown, or other
  misc_difference 74: note = a, c, u, g, unknown, or other
  misc_difference 75: note = a, c, u, g, unknown, or other
  misc_difference 77: note = a, c, u, g, unknown, or other
  misc_difference 80: note = a, c, u, g, unknown, or other
  misc_difference 81: note = a, c, u, g, unknown, or other
  misc_difference 82: note = a, c, u, g, unknown, or other
  misc_difference 87: note = a, c, u, g, unknown, or other
  misc_difference 90: note = a, c, u, g, unknown, or other
  misc_difference 91: note = a, c, u, g, unknown, or other
  misc_difference 92: note = a, c, u, g, unknown, or other
  misc_difference 93: note = a, c, u, g, unknown, or other
  misc_difference 94: note = a, c, u, g, unknown, or other
  misc_difference 95: note = a, c, u, g, unknown, or other
  misc_difference 100: note = a, c, u, g, unknown, or other
  misc_difference 105: note = a, c, u, g, unknown, or other
  misc_difference 118: note = a, c, u, g, unknown, or other
  misc_difference 119: note = a, c, u, g, unknown, or other
  misc_difference 120: note = a, c, u, g, unknown, or other
  misc_difference 125: note = a, c, u, g, unknown, or other
  misc_difference 126: note = a, c, u, g, unknown, or other
  misc_difference 137: note = a, c, u, g, unknown, or other
  misc_difference 139: note = a, c, u, g, unknown, or other
  misc_difference 140: note = a, c, u, g, unknown, or other
  misc_difference 141: note = a, c, u, g, unknown, or other
  misc_difference 142: note = a, c, u, g, unknown, or other
  misc_difference 143: note = a, c, u, g, unknown, or other
  misc_difference 151: note = a, c, u, g, unknown, or other
  misc_difference 152: note = a, c, u, g, unknown, or other
  misc_difference 154: note = a, c, u, g, unknown, or other
  misc_difference 171: note = a, c, u, g, unknown, or other
  misc_difference 182: note = a, c, u, g, unknown, or other
  misc_difference 183: note = a, c, u, g, unknown, or other
  misc_difference 184: note = a, c, u, g, unknown, or other
  misc_difference 188: note = a, c, u, g, unknown, or other
  misc_difference 189: note = a, c, u, g, unknown, or other
  misc_difference 190: note = a, c, u, g, unknown, or other
  misc_difference 191: note = a, c, u, g, unknown, or other
  misc_difference 192: note = a, c, u, g, unknown, or other
  misc_difference 194: note = a, c, u, g, unknown, or other
  misc_difference 198: note = a, c, u, g, unknown, or other
  misc_difference 199: note = a, c, u, g, unknown, or other
  misc_difference 200: note = a, c, u, g, unknown, or other
  misc_difference 201: note = a, c, u, g, unknown, or other
  misc_difference 202: note = a, c, u, g, unknown, or other
  misc_difference 210: note = a, c, u, g, unknown, or other
  misc_difference 211: note = a, c, u, g, unknown, or other
  misc_difference 212: note = a, c, u, g, unknown, or other
  misc_difference 213: note = a, c, u, g, unknown, or other
  misc_difference 214: note = a, c, u, g, unknown, or other
  misc_difference 215: note = a, c, u, g, unknown, or other
nnnnrrntgnnrrgrynrnnrnnrnntraygnnnannnggtyrrnccnrrryyrgnnnarccygnnnnnrycrnngnrynnnraryncgnnnnnntgaynrggrnyyrryyygcgrannncatynnggccrgcggynrnnnnnrcygcrynnrnaggccgrayayatgryngcrycyrryynnnyrynnnnnynyyrnnnnnyycttgynnnnnnggr

SEQ ID NO: 795565 - protein, 97 aa, unidentified
  VARIANT 2: note = Any amino acid
  VARIANT 3: note = Any amino acid
  VARIANT 4: note = Any amino acid
  VARIANT 5: note = Any amino acid
  VARIANT 6: note = Any amino acid
  VARIANT 7: note = Any amino acid
  VARIANT 8: note = Any amino acid
  VARIANT 9: note = Any amino acid
  VARIANT 10: note = Any amino acid
  VARIANT 11: note = Any amino acid
  VARIANT 12: note = Any amino acid
  VARIANT 13: note = Any amino acid
  VARIANT 14: note = Any amino acid
  VARIANT 15: note = Any amino acid
  VARIANT 16: note = Any amino acid
  VARIANT 17: note = Any amino acid
  VARIANT 18: note = Any amino acid
  VARIANT 19: note = Any amino acid
  VARIANT 20: note = Any amino acid
  VARIANT 21: note = Any amino acid
  VARIANT 22: note = Any amino acid
  VARIANT 23: note = Any amino acid
  VARIANT 24: note = Any amino acid
  VARIANT 25: note = Any amino acid
  VARIANT 26: note = Any amino acid
  VARIANT 27: note = Any amino acid
  VARIANT 28: note = Any amino acid
  VARIANT 29: note = Any amino acid
  VARIANT 30: note = Any amino acid
  VARIANT 31: note = Any amino acid
  VARIANT 32: note = Any amino acid
  VARIANT 33: note = Any amino acid
  VARIANT 34: note = Any amino acid
  VARIANT 35: note = Any amino acid
  VARIANT 36: note = Any amino acid
  VARIANT 37: note = Any amino acid
  VARIANT 38: note = Any amino acid
  VARIANT 39: note = Any amino acid
  VARIANT 40: note = Any amino acid
  VARIANT 41: note = Any amino acid
  VARIANT 42: note = Any amino acid
  VARIANT 43: note = Any amino acid
  VARIANT 44: note = Any amino acid
  VARIANT 45: note = Any amino acid
  VARIANT 46: note = Any amino acid
  VARIANT 47: note = Any amino acid
  VARIANT 48: note = Any amino acid
  VARIANT 49: note = Any amino acid
  VARIANT 50: note = Any amino acid
  VARIANT 51: note = Any amino acid
  VARIANT 53: note = Any amino acid
  VARIANT 54: note = Any amino acid
  VARIANT 55: note = Any amino acid
  VARIANT 56: note = Any amino acid
  VARIANT 57: note = Any amino acid
  VARIANT 58: note = Any amino acid
  VARIANT 59: note = Any amino acid
  VARIANT 60: note = Any amino acid
  VARIANT 61: note = Any amino acid
  VARIANT 62: note = Any amino acid
  VARIANT 63: note = Any amino acid
  VARIANT 64: note = Any amino acid
  VARIANT 65: note = Any amino acid
  VARIANT 66: note = Any amino acid
  VARIANT 67: note = Any amino acid
  VARIANT 68: note = Any amino acid
  VARIANT 69: note = Any amino acid
  VARIANT 70: note = Any amino acid
  VARIANT 71: note = Any amino acid
  VARIANT 72: note = Any amino acid
  VARIANT 73: note = Any amino acid
  VARIANT 74: note = Any amino acid
  VARIANT 75: note = Any amino acid
  VARIANT 76: note = Any amino acid
  VARIANT 77: note = Any amino acid
  VARIANT 78: note = Any amino acid
  VARIANT 79: note = Any amino acid
  VARIANT 80: note = Any amino acid
  VARIANT 81: note = Any amino acid
  VARIANT 82: note = Any amino acid
  VARIANT 83: note = Any amino acid
  VARIANT 84: note = Any amino acid
  VARIANT 85: note = Any amino acid
  VARIANT 86: note = Any amino acid
  VARIANT 87: note = Any amino acid
  VARIANT 88: note = Any amino acid
  VARIANT 89: note = Any amino acid
  VARIANT 90: note = Any amino acid
  VARIANT 91: note = Any amino acid
  VARIANT 93: note = Any amino acid
  VARIANT 95: note = Any amino acid
  VARIANT 96: note = Any amino acid
  VARIANT 2..51: note = This region may encompass 43-50 residues
  VARIANT 53..91: note = This region may encompass 33-39 residues
DXXXXXXXXXXXXXXXXXXXXXXXXXXXXXXXXXXXXXXXXXXXXXXXXXXEXXXXXXXXXXXXXXXXXXXXXXXXXXXXXXXXXXXXXXXKXDXXD

SEQ ID NO: 795566 - protein, 102 aa, unidentified
  VARIANT 2: note = Any amino acid
  VARIANT 3: note = Any amino acid
  VARIANT 4: note = Any amino acid
  VARIANT 5: note = Any amino acid
  VARIANT 6: note = Any amino acid
  VARIANT 7: note = Any amino acid
  VARIANT 8: note = Any amino acid
  VARIANT 9: note = Any amino acid
  VARIANT 10: note = Any amino acid
  VARIANT 11: note = Any amino acid
  VARIANT 12: note = Any amino acid
  VARIANT 13: note = Any amino acid
  VARIANT 14: note = Any amino acid
  VARIANT 15: note = Any amino acid
  VARIANT 16: note = Any amino acid
  VARIANT 17: note = Any amino acid
  VARIANT 18: note = Any amino acid
  VARIANT 19: note = Any amino acid
  VARIANT 20: note = Any amino acid
  VARIANT 21: note = Any amino acid
  VARIANT 22: note = Any amino acid
  VARIANT 23: note = Any amino acid
  VARIANT 24: note = Any amino acid
  VARIANT 25: note = Any amino acid
  VARIANT 26: note = Any amino acid
  VARIANT 27: note = Any amino acid
  VARIANT 28: note = Any amino acid
  VARIANT 29: note = Any amino acid
  VARIANT 30: note = Any amino acid
  VARIANT 31: note = Any amino acid
  VARIANT 32: note = Any amino acid
  VARIANT 33: note = Any amino acid
  VARIANT 34: note = Any amino acid
  VARIANT 35: note = Any amino acid
  VARIANT 36: note = Any amino acid
  VARIANT 37: note = Any amino acid
  VARIANT 38: note = Any amino acid
  VARIANT 39: note = Any amino acid
  VARIANT 40: note = Any amino acid
  VARIANT 41: note = Any amino acid
  VARIANT 42: note = Any amino acid
  VARIANT 43: note = Any amino acid
  VARIANT 44: note = Any amino acid
  VARIANT 45: note = Any amino acid
  VARIANT 46: note = Any amino acid
  VARIANT 47: note = Any amino acid
  VARIANT 48: note = Any amino acid
  VARIANT 49: note = Any amino acid
  VARIANT 50: note = Any amino acid
  VARIANT 51: note = Any amino acid
  VARIANT 52: note = Any amino acid
  VARIANT 53: note = Any amino acid
  VARIANT 54: note = Any amino acid
  VARIANT 55: note = Any amino acid
  VARIANT 57: note = Any amino acid
  VARIANT 58: note = Any amino acid
  VARIANT 59: note = Any amino acid
  VARIANT 60: note = Any amino acid
  VARIANT 61: note = Any amino acid
  VARIANT 62: note = Any amino acid
  VARIANT 63: note = Any amino acid
  VARIANT 64: note = Any amino acid
  VARIANT 65: note = Any amino acid
  VARIANT 66: note = Any amino acid
  VARIANT 67: note = Any amino acid
  VARIANT 68: note = Any amino acid
  VARIANT 69: note = Any amino acid
  VARIANT 70: note = Any amino acid
  VARIANT 71: note = Any amino acid
  VARIANT 72: note = Any amino acid
  VARIANT 73: note = Any amino acid
  VARIANT 74: note = Any amino acid
  VARIANT 75: note = Any amino acid
  VARIANT 76: note = Any amino acid
  VARIANT 77: note = Any amino acid
  VARIANT 78: note = Any amino acid
  VARIANT 79: note = Any amino acid
  VARIANT 80: note = Any amino acid
  VARIANT 81: note = Any amino acid
  VARIANT 82: note = Any amino acid
  VARIANT 83: note = Any amino acid
  VARIANT 84: note = Any amino acid
  VARIANT 85: note = Any amino acid
  VARIANT 86: note = Any amino acid
  VARIANT 87: note = Any amino acid
  VARIANT 88: note = Any amino acid
  VARIANT 89: note = Any amino acid
  VARIANT 90: note = Any amino acid
  VARIANT 91: note = Any amino acid
  VARIANT 92: note = Any amino acid
  VARIANT 93: note = Any amino acid
  VARIANT 94: note = Any amino acid
  VARIANT 95: note = Any amino acid
  VARIANT 96: note = Any amino acid
  VARIANT 98: note = Any amino acid
  VARIANT 100: note = Any amino acid
  VARIANT 101: note = Any amino acid
  VARIANT 2..55: note = This region may encompass 42-54 residues
  VARIANT 57..96: note = This region may encompass 33-40 residues
DXXXXXXXXXXXXXXXXXXXXXXXXXXXXXXXXXXXXXXXXXXXXXXXXXXXXXXEXXXXXXXXXXXXXXXXXXXXXXXXXXXXXXXXXXXXXXXXKXDXXD

SEQ ID NO: 795567 - protein, 102 aa, unidentified
  VARIANT 2: note = Any amino acid
  VARIANT 3: note = Any amino acid
  VARIANT 4: note = Any amino acid
  VARIANT 5: note = Any amino acid
  VARIANT 6: note = Any amino acid
  VARIANT 7: note = Any amino acid
  VARIANT 8: note = Any amino acid
  VARIANT 9: note = Any amino acid
  VARIANT 10: note = Any amino acid
  VARIANT 11: note = Any amino acid
  VARIANT 12: note = Any amino acid
  VARIANT 13: note = Any amino acid
  VARIANT 14: note = Any amino acid
  VARIANT 15: note = Any amino acid
  VARIANT 16: note = Any amino acid
  VARIANT 17: note = Any amino acid
  VARIANT 18: note = Any amino acid
  VARIANT 19: note = Any amino acid
  VARIANT 20: note = Any amino acid
  VARIANT 21: note = Any amino acid
  VARIANT 22: note = Any amino acid
  VARIANT 23: note = Any amino acid
  VARIANT 24: note = Any amino acid
  VARIANT 25: note = Any amino acid
  VARIANT 26: note = Any amino acid
  VARIANT 27: note = Any amino acid
  VARIANT 28: note = Any amino acid
  VARIANT 29: note = Any amino acid
  VARIANT 30: note = Any amino acid
  VARIANT 31: note = Any amino acid
  VARIANT 32: note = Any amino acid
  VARIANT 33: note = Any amino acid
  VARIANT 34: note = Any amino acid
  VARIANT 35: note = Any amino acid
  VARIANT 36: note = Any amino acid
  VARIANT 37: note = Any amino acid
  VARIANT 38: note = Any amino acid
  VARIANT 39: note = Any amino acid
  VARIANT 40: note = Any amino acid
  VARIANT 41: note = Any amino acid
  VARIANT 42: note = Any amino acid
  VARIANT 43: note = Any amino acid
  VARIANT 44: note = Any amino acid
  VARIANT 45: note = Any amino acid
  VARIANT 46: note = Any amino acid
  VARIANT 47: note = Any amino acid
  VARIANT 48: note = Any amino acid
  VARIANT 49: note = Any amino acid
  VARIANT 50: note = Any amino acid
  VARIANT 51: note = Any amino acid
  VARIANT 52: note = Any amino acid
  VARIANT 53: note = Any amino acid
  VARIANT 54: note = Any amino acid
  VARIANT 55: note = Any amino acid
  VARIANT 56: note = E or A
  VARIANT 57: note = Any amino acid
  VARIANT 58: note = Any amino acid
  VARIANT 59: note = Any amino acid
  VARIANT 60: note = Any amino acid
  VARIANT 61: note = Any amino acid
  VARIANT 62: note = Any amino acid
  VARIANT 63: note = Any amino acid
  VARIANT 64: note = Any amino acid
  VARIANT 65: note = Any amino acid
  VARIANT 66: note = Any amino acid
  VARIANT 67: note = Any amino acid
  VARIANT 68: note = Any amino acid
  VARIANT 69: note = Any amino acid
  VARIANT 70: note = Any amino acid
  VARIANT 71: note = Any amino acid
  VARIANT 72: note = Any amino acid
  VARIANT 73: note = Any amino acid
  VARIANT 74: note = Any amino acid
  VARIANT 75: note = Any amino acid
  VARIANT 76: note = Any amino acid
  VARIANT 77: note = Any amino acid
  VARIANT 78: note = Any amino acid
  VARIANT 79: note = Any amino acid
  VARIANT 80: note = Any amino acid
  VARIANT 81: note = Any amino acid
  VARIANT 82: note = Any amino acid
  VARIANT 83: note = Any amino acid
  VARIANT 84: note = Any amino acid
  VARIANT 85: note = Any amino acid
  VARIANT 86: note = Any amino acid
  VARIANT 87: note = Any amino acid
  VARIANT 88: note = Any amino acid
  VARIANT 89: note = Any amino acid
  VARIANT 90: note = Any amino acid
  VARIANT 91: note = Any amino acid
  VARIANT 92: note = Any amino acid
  VARIANT 93: note = Any amino acid
  VARIANT 94: note = Any amino acid
  VARIANT 95: note = Any amino acid
  VARIANT 96: note = Any amino acid
  VARIANT 98: note = Any amino acid
  VARIANT 100: note = Any amino acid
  VARIANT 101: note = Any amino acid
  VARIANT 2..55: note = This region may encompass 41-54 residues
  VARIANT 57..96: note = This region may encompass 33-40 residues
DXXXXXXXXXXXXXXXXXXXXXXXXXXXXXXXXXXXXXXXXXXXXXXXXXXXXXXXXXXXXXXXXXXXXXXXXXXXXXXXXXXXXXXXXXXXXXXXKXDXXD

SEQ ID NO: 795568 - protein, 103 aa, unidentified
  VARIANT 2: note = Any amino acid
  VARIANT 3: note = Any amino acid
  VARIANT 4: note = Any amino acid
  VARIANT 5: note = Any amino acid
  VARIANT 6: note = Any amino acid
  VARIANT 7: note = Any amino acid
  VARIANT 8: note = Any amino acid
  VARIANT 9: note = Any amino acid
  VARIANT 10: note = Any amino acid
  VARIANT 11: note = Any amino acid
  VARIANT 12: note = Any amino acid
  VARIANT 13: note = Any amino acid
  VARIANT 14: note = Any amino acid
  VARIANT 15: note = Any amino acid
  VARIANT 16: note = Any amino acid
  VARIANT 17: note = Any amino acid
  VARIANT 18: note = Any amino acid
  VARIANT 19: note = Any amino acid
  VARIANT 20: note = Any amino acid
  VARIANT 21: note = Any amino acid
  VARIANT 22: note = Any amino acid
  VARIANT 23: note = Any amino acid
  VARIANT 24: note = Any amino acid
  VARIANT 25: note = Any amino acid
  VARIANT 26: note = Any amino acid
  VARIANT 27: note = Any amino acid
  VARIANT 28: note = Any amino acid
  VARIANT 29: note = Any amino acid
  VARIANT 30: note = Any amino acid
  VARIANT 31: note = Any amino acid
  VARIANT 32: note = Any amino acid
  VARIANT 33: note = Any amino acid
  VARIANT 34: note = Any amino acid
  VARIANT 35: note = Any amino acid
  VARIANT 36: note = Any amino acid
  VARIANT 37: note = Any amino acid
  VARIANT 38: note = Any amino acid
  VARIANT 39: note = Any amino acid
  VARIANT 40: note = Any amino acid
  VARIANT 41: note = Any amino acid
  VARIANT 42: note = Any amino acid
  VARIANT 43: note = Any amino acid
  VARIANT 44: note = Any amino acid
  VARIANT 45: note = Any amino acid
  VARIANT 46: note = Any amino acid
  VARIANT 47: note = Any amino acid
  VARIANT 48: note = Any amino acid
  VARIANT 49: note = Any amino acid
  VARIANT 50: note = Any amino acid
  VARIANT 51: note = Any amino acid
  VARIANT 52: note = Any amino acid
  VARIANT 53: note = Any amino acid
  VARIANT 54: note = Any amino acid
  VARIANT 55: note = Any amino acid
  VARIANT 56: note = Any amino acid
  VARIANT 57: note = E, A, or C
  VARIANT 58: note = Any amino acid
  VARIANT 59: note = Any amino acid
  VARIANT 60: note = Any amino acid
  VARIANT 61: note = Any amino acid
  VARIANT 62: note = Any amino acid
  VARIANT 63: note = Any amino acid
  VARIANT 64: note = Any amino acid
  VARIANT 65: note = Any amino acid
  VARIANT 66: note = Any amino acid
  VARIANT 67: note = Any amino acid
  VARIANT 68: note = Any amino acid
  VARIANT 69: note = Any amino acid
  VARIANT 70: note = Any amino acid
  VARIANT 71: note = Any amino acid
  VARIANT 72: note = Any amino acid
  VARIANT 73: note = Any amino acid
  VARIANT 74: note = Any amino acid
  VARIANT 75: note = Any amino acid
  VARIANT 76: note = Any amino acid
  VARIANT 77: note = Any amino acid
  VARIANT 78: note = Any amino acid
  VARIANT 79: note = Any amino acid
  VARIANT 80: note = Any amino acid
  VARIANT 81: note = Any amino acid
  VARIANT 82: note = Any amino acid
  VARIANT 83: note = Any amino acid
  VARIANT 84: note = Any amino acid
  VARIANT 85: note = Any amino acid
  VARIANT 86: note = Any amino acid
  VARIANT 87: note = Any amino acid
  VARIANT 88: note = Any amino acid
  VARIANT 89: note = Any amino acid
  VARIANT 90: note = Any amino acid
  VARIANT 91: note = Any amino acid
  VARIANT 92: note = Any amino acid
  VARIANT 93: note = Any amino acid
  VARIANT 94: note = Any amino acid
  VARIANT 95: note = Any amino acid
  VARIANT 96: note = Any amino acid
  VARIANT 97: note = Any amino acid
  VARIANT 99: note = Any amino acid
  VARIANT 101: note = Any amino acid
  VARIANT 102: note = Any amino acid
  VARIANT 2..56: note = This region may encompass 40-55 residues
  VARIANT 58..97: note = This region may encompass 33-40 residues
DXXXXXXXXXXXXXXXXXXXXXXXXXXXXXXXXXXXXXXXXXXXXXXXXXXXXXXXXXXXXXXXXXXXXXXXXXXXXXXXXXXXXXXXXXXXXXXXXKXDXXD

SEQ ID NO: 795569 - protein, 91 aa, unidentified
  VARIANT 2: note = Any amino acid
  VARIANT 3: note = Any amino acid
  VARIANT 4: note = Any amino acid
  VARIANT 5: note = Any amino acid
  VARIANT 6: note = Any amino acid
  VARIANT 7: note = Any amino acid
  VARIANT 8: note = Any amino acid
  VARIANT 9: note = Any amino acid
  VARIANT 10: note = Any amino acid
  VARIANT 11: note = Any amino acid
  VARIANT 12: note = Any amino acid
  VARIANT 13: note = Any amino acid
  VARIANT 14: note = Any amino acid
  VARIANT 15: note = Any amino acid
  VARIANT 16: note = Any amino acid
  VARIANT 17: note = Any amino acid
  VARIANT 18: note = Any amino acid
  VARIANT 19: note = Any amino acid
  VARIANT 20: note = Any amino acid
  VARIANT 21: note = Any amino acid
  VARIANT 22: note = Any amino acid
  VARIANT 23: note = Any amino acid
  VARIANT 24: note = Any amino acid
  VARIANT 25: note = Any amino acid
  VARIANT 26: note = Any amino acid
  VARIANT 27: note = Any amino acid
  VARIANT 28: note = Any amino acid
  VARIANT 29: note = Any amino acid
  VARIANT 30: note = Any amino acid
  VARIANT 31: note = Any amino acid
  VARIANT 32: note = Any amino acid
  VARIANT 33: note = Any amino acid
  VARIANT 34: note = Any amino acid
  VARIANT 35: note = Any amino acid
  VARIANT 36: note = Any amino acid
  VARIANT 37: note = Any amino acid
  VARIANT 38: note = Any amino acid
  VARIANT 39: note = Any amino acid
  VARIANT 40: note = Any amino acid
  VARIANT 41: note = Any amino acid
  VARIANT 42: note = Any amino acid
  VARIANT 43: note = Any amino acid
  VARIANT 44: note = Any amino acid
  VARIANT 45: note = Any amino acid
  VARIANT 46: note = Any amino acid
  VARIANT 47: note = Any amino acid
  VARIANT 48: note = Any amino acid
  VARIANT 49: note = Any amino acid
  VARIANT 50: note = Any amino acid
  VARIANT 51: note = Any amino acid
  VARIANT 53: note = Any amino acid
  VARIANT 54: note = Any amino acid
  VARIANT 55: note = Any amino acid
  VARIANT 56: note = Any amino acid
  VARIANT 57: note = Any amino acid
  VARIANT 58: note = Any amino acid
  VARIANT 59: note = Any amino acid
  VARIANT 60: note = Any amino acid
  VARIANT 61: note = Any amino acid
  VARIANT 62: note = Any amino acid
  VARIANT 63: note = Any amino acid
  VARIANT 64: note = Any amino acid
  VARIANT 65: note = Any amino acid
  VARIANT 66: note = Any amino acid
  VARIANT 67: note = Any amino acid
  VARIANT 68: note = Any amino acid
  VARIANT 69: note = Any amino acid
  VARIANT 70: note = Any amino acid
  VARIANT 71: note = Any amino acid
  VARIANT 72: note = Any amino acid
  VARIANT 73: note = Any amino acid
  VARIANT 74: note = Any amino acid
  VARIANT 75: note = Any amino acid
  VARIANT 76: note = Any amino acid
  VARIANT 77: note = Any amino acid
  VARIANT 78: note = Any amino acid
  VARIANT 79: note = Any amino acid
  VARIANT 80: note = Any amino acid
  VARIANT 81: note = Any amino acid
  VARIANT 82: note = Any amino acid
  VARIANT 83: note = Any amino acid
  VARIANT 84: note = Any amino acid
  VARIANT 85: note = Any amino acid
  VARIANT 87: note = Any amino acid
  VARIANT 89: note = Any amino acid
  VARIANT 90: note = Any amino acid
DXXXXXXXXXXXXXXXXXXXXXXXXXXXXXXXXXXXXXXXXXXXXXXXXXXEXXXXXXXXXXXXXXXXXXXXXXXXXXXXXXXXXKXDXXD

SEQ ID NO: 795570 - protein, 91 aa, unidentified
  VARIANT 2: note = Any amino acid
  VARIANT 3: note = Any amino acid
  VARIANT 4: note = Any amino acid
  VARIANT 5: note = Any amino acid
  VARIANT 6: note = Any amino acid
  VARIANT 7: note = Any amino acid
  VARIANT 8: note = Any amino acid
  VARIANT 9: note = Any amino acid
  VARIANT 10: note = Any amino acid
  VARIANT 11: note = Any amino acid
  VARIANT 12: note = Any amino acid
  VARIANT 13: note = Any amino acid
  VARIANT 14: note = Any amino acid
  VARIANT 15: note = Any amino acid
  VARIANT 16: note = Any amino acid
  VARIANT 17: note = Any amino acid
  VARIANT 18: note = Any amino acid
  VARIANT 19: note = Any amino acid
  VARIANT 20: note = Any amino acid
  VARIANT 21: note = Any amino acid
  VARIANT 22: note = Any amino acid
  VARIANT 23: note = Any amino acid
  VARIANT 24: note = Any amino acid
  VARIANT 25: note = Any amino acid
  VARIANT 26: note = Any amino acid
  VARIANT 27: note = Any amino acid
  VARIANT 28: note = Any amino acid
  VARIANT 29: note = Any amino acid
  VARIANT 30: note = Any amino acid
  VARIANT 31: note = Any amino acid
  VARIANT 32: note = Any amino acid
  VARIANT 33: note = Any amino acid
  VARIANT 34: note = Any amino acid
  VARIANT 35: note = Any amino acid
  VARIANT 36: note = Any amino acid
  VARIANT 37: note = Any amino acid
  VARIANT 38: note = Any amino acid
  VARIANT 39: note = Any amino acid
  VARIANT 40: note = Any amino acid
  VARIANT 41: note = Any amino acid
  VARIANT 42: note = Any amino acid
  VARIANT 43: note = Any amino acid
  VARIANT 44: note = Any amino acid
  VARIANT 45: note = Any amino acid
  VARIANT 46: note = Any amino acid
  VARIANT 47: note = Any amino acid
  VARIANT 48: note = Any amino acid
  VARIANT 49: note = Any amino acid
  VARIANT 51: note = Any amino acid
  VARIANT 52: note = Any amino acid
  VARIANT 53: note = Any amino acid
  VARIANT 54: note = Any amino acid
  VARIANT 55: note = Any amino acid
  VARIANT 56: note = Any amino acid
  VARIANT 57: note = Any amino acid
  VARIANT 58: note = Any amino acid
  VARIANT 59: note = Any amino acid
  VARIANT 60: note = Any amino acid
  VARIANT 61: note = Any amino acid
  VARIANT 62: note = Any amino acid
  VARIANT 63: note = Any amino acid
  VARIANT 64: note = Any amino acid
  VARIANT 65: note = Any amino acid
  VARIANT 66: note = Any amino acid
  VARIANT 67: note = Any amino acid
  VARIANT 68: note = Any amino acid
  VARIANT 69: note = Any amino acid
  VARIANT 70: note = Any amino acid
  VARIANT 71: note = Any amino acid
  VARIANT 72: note = Any amino acid
  VARIANT 73: note = Any amino acid
  VARIANT 74: note = Any amino acid
  VARIANT 75: note = Any amino acid
  VARIANT 76: note = Any amino acid
  VARIANT 77: note = Any amino acid
  VARIANT 78: note = Any amino acid
  VARIANT 79: note = Any amino acid
  VARIANT 80: note = Any amino acid
  VARIANT 81: note = Any amino acid
  VARIANT 82: note = Any amino acid
  VARIANT 83: note = Any amino acid
  VARIANT 84: note = Any amino acid
  VARIANT 85: note = Any amino acid
  VARIANT 87: note = Any amino acid
  VARIANT 89: note = Any amino acid
  VARIANT 90: note = Any amino acid
DXXXXXXXXXXXXXXXXXXXXXXXXXXXXXXXXXXXXXXXXXXXXXXXXEXXXXXXXXXXXXXXXXXXXXXXXXXXXXXXXXXXXKXDXXD

SEQ ID NO: 795571 - protein, 88 aa, unidentified
  VARIANT 2: note = Any amino acid
  VARIANT 3: note = Any amino acid
  VARIANT 4: note = Any amino acid
  VARIANT 5: note = Any amino acid
  VARIANT 6: note = Any amino acid
  VARIANT 7: note = Any amino acid
  VARIANT 8: note = Any amino acid
  VARIANT 9: note = Any amino acid
  VARIANT 10: note = Any amino acid
  VARIANT 11: note = Any amino acid
  VARIANT 12: note = Any amino acid
  VARIANT 13: note = Any amino acid
  VARIANT 14: note = Any amino acid
  VARIANT 15: note = Any amino acid
  VARIANT 16: note = Any amino acid
  VARIANT 17: note = Any amino acid
  VARIANT 18: note = Any amino acid
  VARIANT 19: note = Any amino acid
  VARIANT 20: note = Any amino acid
  VARIANT 21: note = Any amino acid
  VARIANT 22: note = Any amino acid
  VARIANT 23: note = Any amino acid
  VARIANT 24: note = Any amino acid
  VARIANT 25: note = Any amino acid
  VARIANT 26: note = Any amino acid
  VARIANT 27: note = Any amino acid
  VARIANT 28: note = Any amino acid
  VARIANT 29: note = Any amino acid
  VARIANT 30: note = Any amino acid
  VARIANT 31: note = Any amino acid
  VARIANT 32: note = Any amino acid
  VARIANT 33: note = Any amino acid
  VARIANT 34: note = Any amino acid
  VARIANT 35: note = Any amino acid
  VARIANT 36: note = Any amino acid
  VARIANT 37: note = Any amino acid
  VARIANT 38: note = Any amino acid
  VARIANT 39: note = Any amino acid
  VARIANT 40: note = Any amino acid
  VARIANT 41: note = Any amino acid
  VARIANT 42: note = Any amino acid
  VARIANT 43: note = Any amino acid
  VARIANT 44: note = Any amino acid
  VARIANT 45: note = Any amino acid
  VARIANT 46: note = Any amino acid
  VARIANT 47: note = Any amino acid
  VARIANT 49: note = Any amino acid
  VARIANT 50: note = Any amino acid
  VARIANT 51: note = Any amino acid
  VARIANT 52: note = Any amino acid
  VARIANT 53: note = Any amino acid
  VARIANT 54: note = Any amino acid
  VARIANT 55: note = Any amino acid
  VARIANT 56: note = Any amino acid
  VARIANT 57: note = Any amino acid
  VARIANT 58: note = Any amino acid
  VARIANT 59: note = Any amino acid
  VARIANT 60: note = Any amino acid
  VARIANT 61: note = Any amino acid
  VARIANT 62: note = Any amino acid
  VARIANT 63: note = Any amino acid
  VARIANT 64: note = Any amino acid
  VARIANT 65: note = Any amino acid
  VARIANT 66: note = Any amino acid
  VARIANT 67: note = Any amino acid
  VARIANT 68: note = Any amino acid
  VARIANT 69: note = Any amino acid
  VARIANT 70: note = Any amino acid
  VARIANT 71: note = Any amino acid
  VARIANT 72: note = Any amino acid
  VARIANT 73: note = Any amino acid
  VARIANT 74: note = Any amino acid
  VARIANT 75: note = Any amino acid
  VARIANT 76: note = Any amino acid
  VARIANT 77: note = Any amino acid
  VARIANT 78: note = Any amino acid
  VARIANT 79: note = Any amino acid
  VARIANT 80: note = Any amino acid
  VARIANT 81: note = Any amino acid
  VARIANT 82: note = Any amino acid
  VARIANT 84: note = Any amino acid
  VARIANT 86: note = Any amino acid
  VARIANT 87: note = Any amino acid
DXXXXXXXXXXXXXXXXXXXXXXXXXXXXXXXXXXXXXXXXXXXXXXEXXXXXXXXXXXXXXXXXXXXXXXXXXXXXXXXXXKXDXXD

SEQ ID NO: 795572 - protein, 96 aa, unidentified
  VARIANT 2: note = Any amino acid
  VARIANT 3: note = Any amino acid
  VARIANT 4: note = Any amino acid
  VARIANT 5: note = Any amino acid
  VARIANT 6: note = Any amino acid
  VARIANT 7: note = Any amino acid
  VARIANT 8: note = Any amino acid
  VARIANT 9: note = Any amino acid
  VARIANT 10: note = Any amino acid
  VARIANT 11: note = Any amino acid
  VARIANT 12: note = Any amino acid
  VARIANT 13: note = Any amino acid
  VARIANT 14: note = Any amino acid
  VARIANT 15: note = Any amino acid
  VARIANT 16: note = Any amino acid
  VARIANT 17: note = Any amino acid
  VARIANT 18: note = Any amino acid
  VARIANT 19: note = Any amino acid
  VARIANT 20: note = Any amino acid
  VARIANT 21: note = Any amino acid
  VARIANT 22: note = Any amino acid
  VARIANT 23: note = Any amino acid
  VARIANT 24: note = Any amino acid
  VARIANT 25: note = Any amino acid
  VARIANT 26: note = Any amino acid
  VARIANT 27: note = Any amino acid
  VARIANT 28: note = Any amino acid
  VARIANT 29: note = Any amino acid
  VARIANT 30: note = Any amino acid
  VARIANT 31: note = Any amino acid
  VARIANT 32: note = Any amino acid
  VARIANT 33: note = Any amino acid
  VARIANT 34: note = Any amino acid
  VARIANT 35: note = Any amino acid
  VARIANT 36: note = Any amino acid
  VARIANT 37: note = Any amino acid
  VARIANT 38: note = Any amino acid
  VARIANT 39: note = Any amino acid
  VARIANT 40: note = Any amino acid
  VARIANT 41: note = Any amino acid
  VARIANT 42: note = Any amino acid
  VARIANT 43: note = Any amino acid
  VARIANT 44: note = Any amino acid
  VARIANT 45: note = Any amino acid
  VARIANT 46: note = Any amino acid
  VARIANT 47: note = Any amino acid
  VARIANT 48: note = Any amino acid
  VARIANT 49: note = Any amino acid
  VARIANT 50: note = Any amino acid
  VARIANT 52: note = Any amino acid
  VARIANT 53: note = Any amino acid
  VARIANT 54: note = Any amino acid
  VARIANT 55: note = Any amino acid
  VARIANT 56: note = Any amino acid
  VARIANT 57: note = Any amino acid
  VARIANT 58: note = Any amino acid
  VARIANT 59: note = Any amino acid
  VARIANT 60: note = Any amino acid
  VARIANT 61: note = Any amino acid
  VARIANT 62: note = Any amino acid
  VARIANT 63: note = Any amino acid
  VARIANT 64: note = Any amino acid
  VARIANT 65: note = Any amino acid
  VARIANT 66: note = Any amino acid
  VARIANT 67: note = Any amino acid
  VARIANT 68: note = Any amino acid
  VARIANT 69: note = Any amino acid
  VARIANT 70: note = Any amino acid
  VARIANT 71: note = Any amino acid
  VARIANT 72: note = Any amino acid
  VARIANT 73: note = Any amino acid
  VARIANT 74: note = Any amino acid
  VARIANT 75: note = Any amino acid
  VARIANT 76: note = Any amino acid
  VARIANT 77: note = Any amino acid
  VARIANT 78: note = Any amino acid
  VARIANT 79: note = Any amino acid
  VARIANT 80: note = Any amino acid
  VARIANT 81: note = Any amino acid
  VARIANT 82: note = Any amino acid
  VARIANT 83: note = Any amino acid
  VARIANT 84: note = Any amino acid
  VARIANT 85: note = Any amino acid
  VARIANT 86: note = Any amino acid
  VARIANT 87: note = Any amino acid
  VARIANT 88: note = Any amino acid
  VARIANT 89: note = Any amino acid
  VARIANT 90: note = Any amino acid
  VARIANT 92: note = Any amino acid
  VARIANT 94: note = Any amino acid
  VARIANT 95: note = Any amino acid
DXXXXXXXXXXXXXXXXXXXXXXXXXXXXXXXXXXXXXXXXXXXXXXXXXEXXXXXXXXXXXXXXXXXXXXXXXXXXXXXXXXXXXXXXXKXDXXD

SEQ ID NO: 795573 - protein, 95 aa, unidentified
  VARIANT 2: note = Any amino acid
  VARIANT 3: note = Any amino acid
  VARIANT 4: note = Any amino acid
  VARIANT 5: note = Any amino acid
  VARIANT 6: note = Any amino acid
  VARIANT 7: note = Any amino acid
  VARIANT 8: note = Any amino acid
  VARIANT 9: note = Any amino acid
  VARIANT 10: note = Any amino acid
  VARIANT 11: note = Any amino acid
  VARIANT 12: note = Any amino acid
  VARIANT 13: note = Any amino acid
  VARIANT 14: note = Any amino acid
  VARIANT 15: note = Any amino acid
  VARIANT 16: note = Any amino acid
  VARIANT 17: note = Any amino acid
  VARIANT 18: note = Any amino acid
  VARIANT 19: note = Any amino acid
  VARIANT 20: note = Any amino acid
  VARIANT 21: note = Any amino acid
  VARIANT 22: note = Any amino acid
  VARIANT 23: note = Any amino acid
  VARIANT 24: note = Any amino acid
  VARIANT 25: note = Any amino acid
  VARIANT 26: note = Any amino acid
  VARIANT 27: note = Any amino acid
  VARIANT 28: note = Any amino acid
  VARIANT 29: note = Any amino acid
  VARIANT 30: note = Any amino acid
  VARIANT 31: note = Any amino acid
  VARIANT 32: note = Any amino acid
  VARIANT 33: note = Any amino acid
  VARIANT 34: note = Any amino acid
  VARIANT 35: note = Any amino acid
  VARIANT 36: note = Any amino acid
  VARIANT 37: note = Any amino acid
  VARIANT 38: note = Any amino acid
  VARIANT 39: note = Any amino acid
  VARIANT 40: note = Any amino acid
  VARIANT 41: note = Any amino acid
  VARIANT 42: note = Any amino acid
  VARIANT 43: note = Any amino acid
  VARIANT 44: note = Any amino acid
  VARIANT 45: note = Any amino acid
  VARIANT 46: note = Any amino acid
  VARIANT 47: note = Any amino acid
  VARIANT 48: note = Any amino acid
  VARIANT 49: note = Any amino acid
  VARIANT 51: note = Any amino acid
  VARIANT 52: note = Any amino acid
  VARIANT 53: note = Any amino acid
  VARIANT 54: note = Any amino acid
  VARIANT 55: note = Any amino acid
  VARIANT 56: note = Any amino acid
  VARIANT 57: note = Any amino acid
  VARIANT 58: note = Any amino acid
  VARIANT 59: note = Any amino acid
  VARIANT 60: note = Any amino acid
  VARIANT 61: note = Any amino acid
  VARIANT 62: note = Any amino acid
  VARIANT 63: note = Any amino acid
  VARIANT 64: note = Any amino acid
  VARIANT 65: note = Any amino acid
  VARIANT 66: note = Any amino acid
  VARIANT 67: note = Any amino acid
  VARIANT 68: note = Any amino acid
  VARIANT 69: note = Any amino acid
  VARIANT 70: note = Any amino acid
  VARIANT 71: note = Any amino acid
  VARIANT 72: note = Any amino acid
  VARIANT 73: note = Any amino acid
  VARIANT 74: note = Any amino acid
  VARIANT 75: note = Any amino acid
  VARIANT 76: note = Any amino acid
  VARIANT 77: note = Any amino acid
  VARIANT 78: note = Any amino acid
  VARIANT 79: note = Any amino acid
  VARIANT 80: note = Any amino acid
  VARIANT 81: note = Any amino acid
  VARIANT 82: note = Any amino acid
  VARIANT 83: note = Any amino acid
  VARIANT 84: note = Any amino acid
  VARIANT 85: note = Any amino acid
  VARIANT 86: note = Any amino acid
  VARIANT 87: note = Any amino acid
  VARIANT 88: note = Any amino acid
  VARIANT 89: note = Any amino acid
  VARIANT 91: note = Any amino acid
  VARIANT 93: note = Any amino acid
  VARIANT 94: note = Any amino acid
DXXXXXXXXXXXXXXXXXXXXXXXXXXXXXXXXXXXXXXXXXXXXXXXXEXXXXXXXXXXXXXXXXXXXXXXXXXXXXXXXXXXXXXXXKXDXXD

SEQ ID NO: 795574 - protein, 94 aa, unidentified
  VARIANT 2: note = Any amino acid
  VARIANT 3: note = Any amino acid
  VARIANT 4: note = Any amino acid
  VARIANT 5: note = Any amino acid
  VARIANT 6: note = Any amino acid
  VARIANT 7: note = Any amino acid
  VARIANT 8: note = Any amino acid
  VARIANT 9: note = Any amino acid
  VARIANT 10: note = Any amino acid
  VARIANT 11: note = Any amino acid
  VARIANT 12: note = Any amino acid
  VARIANT 13: note = Any amino acid
  VARIANT 14: note = Any amino acid
  VARIANT 15: note = Any amino acid
  VARIANT 16: note = Any amino acid
  VARIANT 17: note = Any amino acid
  VARIANT 18: note = Any amino acid
  VARIANT 19: note = Any amino acid
  VARIANT 20: note = Any amino acid
  VARIANT 21: note = Any amino acid
  VARIANT 22: note = Any amino acid
  VARIANT 23: note = Any amino acid
  VARIANT 24: note = Any amino acid
  VARIANT 25: note = Any amino acid
  VARIANT 26: note = Any amino acid
  VARIANT 27: note = Any amino acid
  VARIANT 28: note = Any amino acid
  VARIANT 29: note = Any amino acid
  VARIANT 30: note = Any amino acid
  VARIANT 31: note = Any amino acid
  VARIANT 32: note = Any amino acid
  VARIANT 33: note = Any amino acid
  VARIANT 34: note = Any amino acid
  VARIANT 35: note = Any amino acid
  VARIANT 36: note = Any amino acid
  VARIANT 37: note = Any amino acid
  VARIANT 38: note = Any amino acid
  VARIANT 39: note = Any amino acid
  VARIANT 40: note = Any amino acid
  VARIANT 41: note = Any amino acid
  VARIANT 42: note = Any amino acid
  VARIANT 43: note = Any amino acid
  VARIANT 44: note = Any amino acid
  VARIANT 45: note = Any amino acid
  VARIANT 46: note = Any amino acid
  VARIANT 47: note = Any amino acid
  VARIANT 48: note = Any amino acid
  VARIANT 50: note = Any amino acid
  VARIANT 51: note = Any amino acid
  VARIANT 52: note = Any amino acid
  VARIANT 53: note = Any amino acid
  VARIANT 54: note = Any amino acid
  VARIANT 55: note = Any amino acid
  VARIANT 56: note = Any amino acid
  VARIANT 57: note = Any amino acid
  VARIANT 58: note = Any amino acid
  VARIANT 59: note = Any amino acid
  VARIANT 60: note = Any amino acid
  VARIANT 61: note = Any amino acid
  VARIANT 62: note = Any amino acid
  VARIANT 63: note = Any amino acid
  VARIANT 64: note = Any amino acid
  VARIANT 65: note = Any amino acid
  VARIANT 66: note = Any amino acid
  VARIANT 67: note = Any amino acid
  VARIANT 68: note = Any amino acid
  VARIANT 69: note = Any amino acid
  VARIANT 70: note = Any amino acid
  VARIANT 71: note = Any amino acid
  VARIANT 72: note = Any amino acid
  VARIANT 73: note = Any amino acid
  VARIANT 74: note = Any amino acid
  VARIANT 75: note = Any amino acid
  VARIANT 76: note = Any amino acid
  VARIANT 77: note = Any amino acid
  VARIANT 78: note = Any amino acid
  VARIANT 79: note = Any amino acid
  VARIANT 80: note = Any amino acid
  VARIANT 81: note = Any amino acid
  VARIANT 82: note = Any amino acid
  VARIANT 83: note = Any amino acid
  VARIANT 84: note = Any amino acid
  VARIANT 85: note = Any amino acid
  VARIANT 86: note = Any amino acid
  VARIANT 87: note = Any amino acid
  VARIANT 88: note = Any amino acid
  VARIANT 90: note = Any amino acid
  VARIANT 92: note = Any amino acid
  VARIANT 93: note = Any amino acid
DXXXXXXXXXXXXXXXXXXXXXXXXXXXXXXXXXXXXXXXXXXXXXXXEXXXXXXXXXXXXXXXXXXXXXXXXXXXXXXXXXXXXXXXKXDXXD

SEQ ID NO: 795575 - protein, 95 aa, unidentified
  VARIANT 2: note = Any amino acid
  VARIANT 3: note = Any amino acid
  VARIANT 4: note = Any amino acid
  VARIANT 5: note = Any amino acid
  VARIANT 6: note = Any amino acid
  VARIANT 7: note = Any amino acid
  VARIANT 8: note = Any amino acid
  VARIANT 9: note = Any amino acid
  VARIANT 10: note = Any amino acid
  VARIANT 11: note = Any amino acid
  VARIANT 12: note = Any amino acid
  VARIANT 13: note = Any amino acid
  VARIANT 14: note = Any amino acid
  VARIANT 15: note = Any amino acid
  VARIANT 16: note = Any amino acid
  VARIANT 17: note = Any amino acid
  VARIANT 18: note = Any amino acid
  VARIANT 19: note = Any amino acid
  VARIANT 20: note = Any amino acid
  VARIANT 21: note = Any amino acid
  VARIANT 22: note = Any amino acid
  VARIANT 23: note = Any amino acid
  VARIANT 24: note = Any amino acid
  VARIANT 25: note = Any amino acid
  VARIANT 26: note = Any amino acid
  VARIANT 27: note = Any amino acid
  VARIANT 28: note = Any amino acid
  VARIANT 29: note = Any amino acid
  VARIANT 30: note = Any amino acid
  VARIANT 31: note = Any amino acid
  VARIANT 32: note = Any amino acid
  VARIANT 33: note = Any amino acid
  VARIANT 34: note = Any amino acid
  VARIANT 35: note = Any amino acid
  VARIANT 36: note = Any amino acid
  VARIANT 37: note = Any amino acid
  VARIANT 38: note = Any amino acid
  VARIANT 39: note = Any amino acid
  VARIANT 40: note = Any amino acid
  VARIANT 41: note = Any amino acid
  VARIANT 42: note = Any amino acid
  VARIANT 43: note = Any amino acid
  VARIANT 44: note = Any amino acid
  VARIANT 45: note = Any amino acid
  VARIANT 46: note = Any amino acid
  VARIANT 47: note = Any amino acid
  VARIANT 48: note = Any amino acid
  VARIANT 50: note = Any amino acid
  VARIANT 51: note = Any amino acid
  VARIANT 52: note = Any amino acid
  VARIANT 53: note = Any amino acid
  VARIANT 54: note = Any amino acid
  VARIANT 55: note = Any amino acid
  VARIANT 56: note = Any amino acid
  VARIANT 57: note = Any amino acid
  VARIANT 58: note = Any amino acid
  VARIANT 59: note = Any amino acid
  VARIANT 60: note = Any amino acid
  VARIANT 61: note = Any amino acid
  VARIANT 62: note = Any amino acid
  VARIANT 63: note = Any amino acid
  VARIANT 64: note = Any amino acid
  VARIANT 65: note = Any amino acid
  VARIANT 66: note = Any amino acid
  VARIANT 67: note = Any amino acid
  VARIANT 68: note = Any amino acid
  VARIANT 69: note = Any amino acid
  VARIANT 70: note = Any amino acid
  VARIANT 71: note = Any amino acid
  VARIANT 72: note = Any amino acid
  VARIANT 73: note = Any amino acid
  VARIANT 74: note = Any amino acid
  VARIANT 75: note = Any amino acid
  VARIANT 76: note = Any amino acid
  VARIANT 77: note = Any amino acid
  VARIANT 78: note = Any amino acid
  VARIANT 79: note = Any amino acid
  VARIANT 80: note = Any amino acid
  VARIANT 81: note = Any amino acid
  VARIANT 82: note = Any amino acid
  VARIANT 83: note = Any amino acid
  VARIANT 84: note = Any amino acid
  VARIANT 85: note = Any amino acid
  VARIANT 86: note = Any amino acid
  VARIANT 87: note = Any amino acid
  VARIANT 88: note = Any amino acid
  VARIANT 89: note = Any amino acid
  VARIANT 91: note = Any amino acid
  VARIANT 93: note = Any amino acid
  VARIANT 94: note = Any amino acid
DXXXXXXXXXXXXXXXXXXXXXXXXXXXXXXXXXXXXXXXXXXXXXXXEXXXXXXXXXXXXXXXXXXXXXXXXXXXXXXXXXXXXXXXXKXDXXD

SEQ ID NO: 795576 - protein, 89 aa, unidentified
  VARIANT 2: note = Any amino acid
  VARIANT 3: note = Any amino acid
  VARIANT 4: note = Any amino acid
  VARIANT 5: note = Any amino acid
  VARIANT 6: note = Any amino acid
  VARIANT 7: note = Any amino acid
  VARIANT 8: note = Any amino acid
  VARIANT 9: note = Any amino acid
  VARIANT 10: note = Any amino acid
  VARIANT 11: note = Any amino acid
  VARIANT 12: note = Any amino acid
  VARIANT 13: note = Any amino acid
  VARIANT 14: note = Any amino acid
  VARIANT 15: note = Any amino acid
  VARIANT 16: note = Any amino acid
  VARIANT 17: note = Any amino acid
  VARIANT 18: note = Any amino acid
  VARIANT 19: note = Any amino acid
  VARIANT 20: note = Any amino acid
  VARIANT 21: note = Any amino acid
  VARIANT 22: note = Any amino acid
  VARIANT 23: note = Any amino acid
  VARIANT 24: note = Any amino acid
  VARIANT 25: note = Any amino acid
  VARIANT 26: note = Any amino acid
  VARIANT 27: note = Any amino acid
  VARIANT 28: note = Any amino acid
  VARIANT 29: note = Any amino acid
  VARIANT 30: note = Any amino acid
  VARIANT 31: note = Any amino acid
  VARIANT 32: note = Any amino acid
  VARIANT 33: note = Any amino acid
  VARIANT 34: note = Any amino acid
  VARIANT 35: note = Any amino acid
  VARIANT 36: note = Any amino acid
  VARIANT 37: note = Any amino acid
  VARIANT 38: note = Any amino acid
  VARIANT 39: note = Any amino acid
  VARIANT 40: note = Any amino acid
  VARIANT 41: note = Any amino acid
  VARIANT 42: note = Any amino acid
  VARIANT 43: note = Any amino acid
  VARIANT 45: note = Any amino acid
  VARIANT 46: note = Any amino acid
  VARIANT 47: note = Any amino acid
  VARIANT 48: note = Any amino acid
  VARIANT 49: note = Any amino acid
  VARIANT 50: note = Any amino acid
  VARIANT 51: note = Any amino acid
  VARIANT 52: note = Any amino acid
  VARIANT 53: note = Any amino acid
  VARIANT 54: note = Any amino acid
  VARIANT 55: note = Any amino acid
  VARIANT 56: note = Any amino acid
  VARIANT 57: note = Any amino acid
  VARIANT 58: note = Any amino acid
  VARIANT 59: note = Any amino acid
  VARIANT 60: note = Any amino acid
  VARIANT 61: note = Any amino acid
  VARIANT 62: note = Any amino acid
  VARIANT 63: note = Any amino acid
  VARIANT 64: note = Any amino acid
  VARIANT 65: note = Any amino acid
  VARIANT 66: note = Any amino acid
  VARIANT 67: note = Any amino acid
  VARIANT 68: note = Any amino acid
  VARIANT 69: note = Any amino acid
  VARIANT 70: note = Any amino acid
  VARIANT 71: note = Any amino acid
  VARIANT 72: note = Any amino acid
  VARIANT 73: note = Any amino acid
  VARIANT 74: note = Any amino acid
  VARIANT 75: note = Any amino acid
  VARIANT 76: note = Any amino acid
  VARIANT 77: note = Any amino acid
  VARIANT 78: note = Any amino acid
  VARIANT 79: note = Any amino acid
  VARIANT 80: note = Any amino acid
  VARIANT 81: note = Any amino acid
  VARIANT 82: note = Any amino acid
  VARIANT 83: note = Any amino acid
  VARIANT 85: note = Any amino acid
  VARIANT 87: note = Any amino acid
  VARIANT 88: note = Any amino acid
DXXXXXXXXXXXXXXXXXXXXXXXXXXXXXXXXXXXXXXXXXXEXXXXXXXXXXXXXXXXXXXXXXXXXXXXXXXXXXXXXXXKXDXXD

SEQ ID NO: 795577 - protein, 92 aa, unidentified
  VARIANT 2: note = Any amino acid
  VARIANT 3: note = Any amino acid
  VARIANT 4: note = Any amino acid
  VARIANT 5: note = Any amino acid
  VARIANT 6: note = Any amino acid
  VARIANT 7: note = Any amino acid
  VARIANT 8: note = Any amino acid
  VARIANT 9: note = Any amino acid
  VARIANT 10: note = Any amino acid
  VARIANT 11: note = Any amino acid
  VARIANT 12: note = Any amino acid
  VARIANT 13: note = Any amino acid
  VARIANT 14: note = Any amino acid
  VARIANT 15: note = Any amino acid
  VARIANT 16: note = Any amino acid
  VARIANT 17: note = Any amino acid
  VARIANT 18: note = Any amino acid
  VARIANT 19: note = Any amino acid
  VARIANT 20: note = Any amino acid
  VARIANT 21: note = Any amino acid
  VARIANT 22: note = Any amino acid
  VARIANT 23: note = Any amino acid
  VARIANT 24: note = Any amino acid
  VARIANT 25: note = Any amino acid
  VARIANT 26: note = Any amino acid
  VARIANT 27: note = Any amino acid
  VARIANT 28: note = Any amino acid
  VARIANT 29: note = Any amino acid
  VARIANT 30: note = Any amino acid
  VARIANT 31: note = Any amino acid
  VARIANT 32: note = Any amino acid
  VARIANT 33: note = Any amino acid
  VARIANT 34: note = Any amino acid
  VARIANT 35: note = Any amino acid
  VARIANT 36: note = Any amino acid
  VARIANT 37: note = Any amino acid
  VARIANT 38: note = Any amino acid
  VARIANT 39: note = Any amino acid
  VARIANT 40: note = Any amino acid
  VARIANT 41: note = Any amino acid
  VARIANT 42: note = Any amino acid
  VARIANT 43: note = Any amino acid
  VARIANT 44: note = Any amino acid
  VARIANT 45: note = Any amino acid
  VARIANT 46: note = Any amino acid
  VARIANT 47: note = Any amino acid
  VARIANT 48: note = Any amino acid
  VARIANT 50: note = Any amino acid
  VARIANT 51: note = Any amino acid
  VARIANT 52: note = Any amino acid
  VARIANT 53: note = Any amino acid
  VARIANT 54: note = Any amino acid
  VARIANT 55: note = Any amino acid
  VARIANT 56: note = Any amino acid
  VARIANT 57: note = Any amino acid
  VARIANT 58: note = Any amino acid
  VARIANT 59: note = Any amino acid
  VARIANT 60: note = Any amino acid
  VARIANT 61: note = Any amino acid
  VARIANT 62: note = Any amino acid
  VARIANT 63: note = Any amino acid
  VARIANT 64: note = Any amino acid
  VARIANT 65: note = Any amino acid
  VARIANT 66: note = Any amino acid
  VARIANT 67: note = Any amino acid
  VARIANT 68: note = Any amino acid
  VARIANT 69: note = Any amino acid
  VARIANT 70: note = Any amino acid
  VARIANT 71: note = Any amino acid
  VARIANT 72: note = Any amino acid
  VARIANT 73: note = Any amino acid
  VARIANT 74: note = Any amino acid
  VARIANT 75: note = Any amino acid
  VARIANT 76: note = Any amino acid
  VARIANT 77: note = Any amino acid
  VARIANT 78: note = Any amino acid
  VARIANT 79: note = Any amino acid
  VARIANT 80: note = Any amino acid
  VARIANT 81: note = Any amino acid
  VARIANT 82: note = Any amino acid
  VARIANT 83: note = Any amino acid
  VARIANT 84: note = Any amino acid
  VARIANT 85: note = Any amino acid
  VARIANT 86: note = Any amino acid
  VARIANT 88: note = Any amino acid
  VARIANT 90: note = Any amino acid
  VARIANT 91: note = Any amino acid
DXXXXXXXXXXXXXXXXXXXXXXXXXXXXXXXXXXXXXXXXXXXXXXXEXXXXXXXXXXXXXXXXXXXXXXXXXXXXXXXXXXXXXKXDXXD

SEQ ID NO: 795578 - protein, 98 aa, unidentified
  VARIANT 2: note = Any amino acid
  VARIANT 3: note = Any amino acid
  VARIANT 4: note = Any amino acid
  VARIANT 5: note = Any amino acid
  VARIANT 6: note = Any amino acid
  VARIANT 7: note = Any amino acid
  VARIANT 8: note = Any amino acid
  VARIANT 9: note = Any amino acid
  VARIANT 10: note = Any amino acid
  VARIANT 11: note = Any amino acid
  VARIANT 12: note = Any amino acid
  VARIANT 13: note = Any amino acid
  VARIANT 14: note = Any amino acid
  VARIANT 15: note = Any amino acid
  VARIANT 16: note = Any amino acid
  VARIANT 17: note = Any amino acid
  VARIANT 18: note = Any amino acid
  VARIANT 19: note = Any amino acid
  VARIANT 20: note = Any amino acid
  VARIANT 21: note = Any amino acid
  VARIANT 22: note = Any amino acid
  VARIANT 23: note = Any amino acid
  VARIANT 24: note = Any amino acid
  VARIANT 25: note = Any amino acid
  VARIANT 26: note = Any amino acid
  VARIANT 27: note = Any amino acid
  VARIANT 28: note = Any amino acid
  VARIANT 29: note = Any amino acid
  VARIANT 30: note = Any amino acid
  VARIANT 31: note = Any amino acid
  VARIANT 32: note = Any amino acid
  VARIANT 33: note = Any amino acid
  VARIANT 34: note = Any amino acid
  VARIANT 35: note = Any amino acid
  VARIANT 36: note = Any amino acid
  VARIANT 37: note = Any amino acid
  VARIANT 38: note = Any amino acid
  VARIANT 39: note = Any amino acid
  VARIANT 40: note = Any amino acid
  VARIANT 41: note = Any amino acid
  VARIANT 42: note = Any amino acid
  VARIANT 43: note = Any amino acid
  VARIANT 44: note = Any amino acid
  VARIANT 45: note = Any amino acid
  VARIANT 46: note = Any amino acid
  VARIANT 47: note = Any amino acid
  VARIANT 48: note = Any amino acid
  VARIANT 49: note = Any amino acid
  VARIANT 50: note = Any amino acid
  VARIANT 51: note = Any amino acid
  VARIANT 52: note = Any amino acid
  VARIANT 54: note = Any amino acid
  VARIANT 55: note = Any amino acid
  VARIANT 56: note = Any amino acid
  VARIANT 57: note = Any amino acid
  VARIANT 58: note = Any amino acid
  VARIANT 59: note = Any amino acid
  VARIANT 60: note = Any amino acid
  VARIANT 61: note = Any amino acid
  VARIANT 62: note = Any amino acid
  VARIANT 63: note = Any amino acid
  VARIANT 64: note = Any amino acid
  VARIANT 65: note = Any amino acid
  VARIANT 66: note = Any amino acid
  VARIANT 67: note = Any amino acid
  VARIANT 68: note = Any amino acid
  VARIANT 69: note = Any amino acid
  VARIANT 70: note = Any amino acid
  VARIANT 71: note = Any amino acid
  VARIANT 72: note = Any amino acid
  VARIANT 73: note = Any amino acid
  VARIANT 74: note = Any amino acid
  VARIANT 75: note = Any amino acid
  VARIANT 76: note = Any amino acid
  VARIANT 77: note = Any amino acid
  VARIANT 78: note = Any amino acid
  VARIANT 79: note = Any amino acid
  VARIANT 80: note = Any amino acid
  VARIANT 81: note = Any amino acid
  VARIANT 82: note = Any amino acid
  VARIANT 83: note = Any amino acid
  VARIANT 84: note = Any amino acid
  VARIANT 85: note = Any amino acid
  VARIANT 86: note = Any amino acid
  VARIANT 87: note = Any amino acid
  VARIANT 88: note = Any amino acid
  VARIANT 89: note = Any amino acid
  VARIANT 90: note = Any amino acid
  VARIANT 91: note = Any amino acid
  VARIANT 92: note = Any amino acid
  VARIANT 94: note = Any amino acid
  VARIANT 96: note = Any amino acid
  VARIANT 97: note = Any amino acid
DXXXXXXXXXXXXXXXXXXXXXXXXXXXXXXXXXXXXXXXXXXXXXXXXXXXEXXXXXXXXXXXXXXXXXXXXXXXXXXXXXXXXXXXXXXXKXDXXD

SEQ ID NO: 795579 - protein, 99 aa, unidentified
  VARIANT 2: note = Any amino acid
  VARIANT 3: note = Any amino acid
  VARIANT 4: note = Any amino acid
  VARIANT 5: note = Any amino acid
  VARIANT 6: note = Any amino acid
  VARIANT 7: note = Any amino acid
  VARIANT 8: note = Any amino acid
  VARIANT 9: note = Any amino acid
  VARIANT 10: note = Any amino acid
  VARIANT 11: note = Any amino acid
  VARIANT 12: note = Any amino acid
  VARIANT 13: note = Any amino acid
  VARIANT 14: note = Any amino acid
  VARIANT 15: note = Any amino acid
  VARIANT 16: note = Any amino acid
  VARIANT 17: note = Any amino acid
  VARIANT 18: note = Any amino acid
  VARIANT 19: note = Any amino acid
  VARIANT 20: note = Any amino acid
  VARIANT 21: note = Any amino acid
  VARIANT 22: note = Any amino acid
  VARIANT 23: note = Any amino acid
  VARIANT 24: note = Any amino acid
  VARIANT 25: note = Any amino acid
  VARIANT 26: note = Any amino acid
  VARIANT 27: note = Any amino acid
  VARIANT 28: note = Any amino acid
  VARIANT 29: note = Any amino acid
  VARIANT 30: note = Any amino acid
  VARIANT 31: note = Any amino acid
  VARIANT 32: note = Any amino acid
  VARIANT 33: note = Any amino acid
  VARIANT 34: note = Any amino acid
  VARIANT 35: note = Any amino acid
  VARIANT 36: note = Any amino acid
  VARIANT 37: note = Any amino acid
  VARIANT 38: note = Any amino acid
  VARIANT 39: note = Any amino acid
  VARIANT 40: note = Any amino acid
  VARIANT 41: note = Any amino acid
  VARIANT 42: note = Any amino acid
  VARIANT 43: note = Any amino acid
  VARIANT 44: note = Any amino acid
  VARIANT 45: note = Any amino acid
  VARIANT 46: note = Any amino acid
  VARIANT 47: note = Any amino acid
  VARIANT 48: note = Any amino acid
  VARIANT 49: note = Any amino acid
  VARIANT 50: note = Any amino acid
  VARIANT 51: note = Any amino acid
  VARIANT 52: note = Any amino acid
  VARIANT 53: note = Any amino acid
  VARIANT 55: note = Any amino acid
  VARIANT 56: note = Any amino acid
  VARIANT 57: note = Any amino acid
  VARIANT 58: note = Any amino acid
  VARIANT 59: note = Any amino acid
  VARIANT 60: note = Any amino acid
  VARIANT 61: note = Any amino acid
  VARIANT 62: note = Any amino acid
  VARIANT 63: note = Any amino acid
  VARIANT 64: note = Any amino acid
  VARIANT 65: note = Any amino acid
  VARIANT 66: note = Any amino acid
  VARIANT 67: note = Any amino acid
  VARIANT 68: note = Any amino acid
  VARIANT 69: note = Any amino acid
  VARIANT 70: note = Any amino acid
  VARIANT 71: note = Any amino acid
  VARIANT 72: note = Any amino acid
  VARIANT 73: note = Any amino acid
  VARIANT 74: note = Any amino acid
  VARIANT 75: note = Any amino acid
  VARIANT 76: note = Any amino acid
  VARIANT 77: note = Any amino acid
  VARIANT 78: note = Any amino acid
  VARIANT 79: note = Any amino acid
  VARIANT 80: note = Any amino acid
  VARIANT 81: note = Any amino acid
  VARIANT 82: note = Any amino acid
  VARIANT 83: note = Any amino acid
  VARIANT 84: note = Any amino acid
  VARIANT 85: note = Any amino acid
  VARIANT 86: note = Any amino acid
  VARIANT 87: note = Any amino acid
  VARIANT 88: note = Any amino acid
  VARIANT 89: note = Any amino acid
  VARIANT 90: note = Any amino acid
  VARIANT 91: note = Any amino acid
  VARIANT 92: note = Any amino acid
  VARIANT 93: note = Any amino acid
  VARIANT 95: note = Any amino acid
  VARIANT 97: note = Any amino acid
  VARIANT 98: note = Any amino acid
DXXXXXXXXXXXXXXXXXXXXXXXXXXXXXXXXXXXXXXXXXXXXXXXXXXXXEXXXXXXXXXXXXXXXXXXXXXXXXXXXXXXXXXXXXXXXKXDXXD

SEQ ID NO: 795580 - protein, 88 aa, unidentified
  VARIANT 2: note = Any amino acid
  VARIANT 3: note = Any amino acid
  VARIANT 4: note = Any amino acid
  VARIANT 5: note = Any amino acid
  VARIANT 6: note = Any amino acid
  VARIANT 7: note = Any amino acid
  VARIANT 8: note = Any amino acid
  VARIANT 9: note = Any amino acid
  VARIANT 10: note = Any amino acid
  VARIANT 11: note = Any amino acid
  VARIANT 12: note = Any amino acid
  VARIANT 13: note = Any amino acid
  VARIANT 14: note = Any amino acid
  VARIANT 15: note = Any amino acid
  VARIANT 16: note = Any amino acid
  VARIANT 17: note = Any amino acid
  VARIANT 18: note = Any amino acid
  VARIANT 19: note = Any amino acid
  VARIANT 20: note = Any amino acid
  VARIANT 21: note = Any amino acid
  VARIANT 22: note = Any amino acid
  VARIANT 23: note = Any amino acid
  VARIANT 24: note = Any amino acid
  VARIANT 25: note = Any amino acid
  VARIANT 26: note = Any amino acid
  VARIANT 27: note = Any amino acid
  VARIANT 28: note = Any amino acid
  VARIANT 29: note = Any amino acid
  VARIANT 30: note = Any amino acid
  VARIANT 31: note = Any amino acid
  VARIANT 32: note = Any amino acid
  VARIANT 33: note = Any amino acid
  VARIANT 34: note = Any amino acid
  VARIANT 35: note = Any amino acid
  VARIANT 36: note = Any amino acid
  VARIANT 37: note = Any amino acid
  VARIANT 38: note = Any amino acid
  VARIANT 39: note = Any amino acid
  VARIANT 40: note = Any amino acid
  VARIANT 41: note = Any amino acid
  VARIANT 42: note = Any amino acid
  VARIANT 44: note = Any amino acid
  VARIANT 45: note = Any amino acid
  VARIANT 46: note = Any amino acid
  VARIANT 47: note = Any amino acid
  VARIANT 48: note = Any amino acid
  VARIANT 49: note = Any amino acid
  VARIANT 50: note = Any amino acid
  VARIANT 51: note = Any amino acid
  VARIANT 52: note = Any amino acid
  VARIANT 53: note = Any amino acid
  VARIANT 54: note = Any amino acid
  VARIANT 55: note = Any amino acid
  VARIANT 56: note = Any amino acid
  VARIANT 57: note = Any amino acid
  VARIANT 58: note = Any amino acid
  VARIANT 59: note = Any amino acid
  VARIANT 60: note = Any amino acid
  VARIANT 61: note = Any amino acid
  VARIANT 62: note = Any amino acid
  VARIANT 63: note = Any amino acid
  VARIANT 64: note = Any amino acid
  VARIANT 65: note = Any amino acid
  VARIANT 66: note = Any amino acid
  VARIANT 67: note = Any amino acid
  VARIANT 68: note = Any amino acid
  VARIANT 69: note = Any amino acid
  VARIANT 70: note = Any amino acid
  VARIANT 71: note = Any amino acid
  VARIANT 72: note = Any amino acid
  VARIANT 73: note = Any amino acid
  VARIANT 74: note = Any amino acid
  VARIANT 75: note = Any amino acid
  VARIANT 76: note = Any amino acid
  VARIANT 77: note = Any amino acid
  VARIANT 78: note = Any amino acid
  VARIANT 79: note = Any amino acid
  VARIANT 80: note = Any amino acid
  VARIANT 81: note = Any amino acid
  VARIANT 82: note = Any amino acid
  VARIANT 84: note = Any amino acid
  VARIANT 86: note = Any amino acid
  VARIANT 87: note = Any amino acid
DXXXXXXXXXXXXXXXXXXXXXXXXXXXXXXXXXXXXXXXXXEXXXXXXXXXXXXXXXXXXXXXXXXXXXXXXXXXXXXXXXKXDXXD

SEQ ID NO: 795581 - protein, 91 aa, unidentified
  VARIANT 2: note = Any amino acid
  VARIANT 3: note = Any amino acid
  VARIANT 4: note = Any amino acid
  VARIANT 5: note = Any amino acid
  VARIANT 6: note = Any amino acid
  VARIANT 7: note = Any amino acid
  VARIANT 8: note = Any amino acid
  VARIANT 9: note = Any amino acid
  VARIANT 10: note = Any amino acid
  VARIANT 11: note = Any amino acid
  VARIANT 12: note = Any amino acid
  VARIANT 13: note = Any amino acid
  VARIANT 14: note = Any amino acid
  VARIANT 15: note = Any amino acid
  VARIANT 16: note = Any amino acid
  VARIANT 17: note = Any amino acid
  VARIANT 18: note = Any amino acid
  VARIANT 19: note = Any amino acid
  VARIANT 20: note = Any amino acid
  VARIANT 21: note = Any amino acid
  VARIANT 22: note = Any amino acid
  VARIANT 23: note = Any amino acid
  VARIANT 24: note = Any amino acid
  VARIANT 25: note = Any amino acid
  VARIANT 26: note = Any amino acid
  VARIANT 27: note = Any amino acid
  VARIANT 28: note = Any amino acid
  VARIANT 29: note = Any amino acid
  VARIANT 30: note = Any amino acid
  VARIANT 31: note = Any amino acid
  VARIANT 32: note = Any amino acid
  VARIANT 33: note = Any amino acid
  VARIANT 34: note = Any amino acid
  VARIANT 35: note = Any amino acid
  VARIANT 36: note = Any amino acid
  VARIANT 37: note = Any amino acid
  VARIANT 38: note = Any amino acid
  VARIANT 39: note = Any amino acid
  VARIANT 40: note = Any amino acid
  VARIANT 41: note = Any amino acid
  VARIANT 42: note = Any amino acid
  VARIANT 43: note = Any amino acid
  VARIANT 44: note = Any amino acid
  VARIANT 45: note = Any amino acid
  VARIANT 47: note = Any amino acid
  VARIANT 48: note = Any amino acid
  VARIANT 49: note = Any amino acid
  VARIANT 50: note = Any amino acid
  VARIANT 51: note = Any amino acid
  VARIANT 52: note = Any amino acid
  VARIANT 53: note = Any amino acid
  VARIANT 54: note = Any amino acid
  VARIANT 55: note = Any amino acid
  VARIANT 56: note = Any amino acid
  VARIANT 57: note = Any amino acid
  VARIANT 58: note = Any amino acid
  VARIANT 59: note = Any amino acid
  VARIANT 60: note = Any amino acid
  VARIANT 61: note = Any amino acid
  VARIANT 62: note = Any amino acid
  VARIANT 63: note = Any amino acid
  VARIANT 64: note = Any amino acid
  VARIANT 65: note = Any amino acid
  VARIANT 66: note = Any amino acid
  VARIANT 67: note = Any amino acid
  VARIANT 68: note = Any amino acid
  VARIANT 69: note = Any amino acid
  VARIANT 70: note = Any amino acid
  VARIANT 71: note = Any amino acid
  VARIANT 72: note = Any amino acid
  VARIANT 73: note = Any amino acid
  VARIANT 74: note = Any amino acid
  VARIANT 75: note = Any amino acid
  VARIANT 76: note = Any amino acid
  VARIANT 77: note = Any amino acid
  VARIANT 78: note = Any amino acid
  VARIANT 79: note = Any amino acid
  VARIANT 80: note = Any amino acid
  VARIANT 81: note = Any amino acid
  VARIANT 82: note = Any amino acid
  VARIANT 83: note = Any amino acid
  VARIANT 84: note = Any amino acid
  VARIANT 85: note = Any amino acid
  VARIANT 87: note = Any amino acid
  VARIANT 89: note = Any amino acid
  VARIANT 90: note = Any amino acid
DXXXXXXXXXXXXXXXXXXXXXXXXXXXXXXXXXXXXXXXXXXXXEXXXXXXXXXXXXXXXXXXXXXXXXXXXXXXXXXXXXXXXKXDXXD

SEQ ID NO: 795582 - protein, 101 aa, unidentified
  VARIANT 2: note = Any amino acid
  VARIANT 3: note = Any amino acid
  VARIANT 4: note = Any amino acid
  VARIANT 5: note = Any amino acid
  VARIANT 6: note = Any amino acid
  VARIANT 7: note = Any amino acid
  VARIANT 8: note = Any amino acid
  VARIANT 9: note = Any amino acid
  VARIANT 10: note = Any amino acid
  VARIANT 11: note = Any amino acid
  VARIANT 12: note = Any amino acid
  VARIANT 13: note = Any amino acid
  VARIANT 14: note = Any amino acid
  VARIANT 15: note = Any amino acid
  VARIANT 16: note = Any amino acid
  VARIANT 17: note = Any amino acid
  VARIANT 18: note = Any amino acid
  VARIANT 19: note = Any amino acid
  VARIANT 20: note = Any amino acid
  VARIANT 21: note = Any amino acid
  VARIANT 22: note = Any amino acid
  VARIANT 23: note = Any amino acid
  VARIANT 24: note = Any amino acid
  VARIANT 25: note = Any amino acid
  VARIANT 26: note = Any amino acid
  VARIANT 27: note = Any amino acid
  VARIANT 28: note = Any amino acid
  VARIANT 29: note = Any amino acid
  VARIANT 30: note = Any amino acid
  VARIANT 31: note = Any amino acid
  VARIANT 32: note = Any amino acid
  VARIANT 33: note = Any amino acid
  VARIANT 34: note = Any amino acid
  VARIANT 35: note = Any amino acid
  VARIANT 36: note = Any amino acid
  VARIANT 37: note = Any amino acid
  VARIANT 38: note = Any amino acid
  VARIANT 39: note = Any amino acid
  VARIANT 40: note = Any amino acid
  VARIANT 41: note = Any amino acid
  VARIANT 42: note = Any amino acid
  VARIANT 43: note = Any amino acid
  VARIANT 44: note = Any amino acid
  VARIANT 45: note = Any amino acid
  VARIANT 46: note = Any amino acid
  VARIANT 47: note = Any amino acid
  VARIANT 48: note = Any amino acid
  VARIANT 49: note = Any amino acid
  VARIANT 50: note = Any amino acid
  VARIANT 51: note = Any amino acid
  VARIANT 52: note = Any amino acid
  VARIANT 53: note = Any amino acid
  VARIANT 54: note = Any amino acid
  VARIANT 56: note = Any amino acid
  VARIANT 57: note = Any amino acid
  VARIANT 58: note = Any amino acid
  VARIANT 59: note = Any amino acid
  VARIANT 60: note = Any amino acid
  VARIANT 61: note = Any amino acid
  VARIANT 62: note = Any amino acid
  VARIANT 63: note = Any amino acid
  VARIANT 64: note = Any amino acid
  VARIANT 65: note = Any amino acid
  VARIANT 66: note = Any amino acid
  VARIANT 67: note = Any amino acid
  VARIANT 68: note = Any amino acid
  VARIANT 69: note = Any amino acid
  VARIANT 70: note = Any amino acid
  VARIANT 71: note = Any amino acid
  VARIANT 72: note = Any amino acid
  VARIANT 73: note = Any amino acid
  VARIANT 74: note = Any amino acid
  VARIANT 75: note = Any amino acid
  VARIANT 76: note = Any amino acid
  VARIANT 77: note = Any amino acid
  VARIANT 78: note = Any amino acid
  VARIANT 79: note = Any amino acid
  VARIANT 80: note = Any amino acid
  VARIANT 81: note = Any amino acid
  VARIANT 82: note = Any amino acid
  VARIANT 83: note = Any amino acid
  VARIANT 84: note = Any amino acid
  VARIANT 85: note = Any amino acid
  VARIANT 86: note = Any amino acid
  VARIANT 87: note = Any amino acid
  VARIANT 88: note = Any amino acid
  VARIANT 89: note = Any amino acid
  VARIANT 90: note = Any amino acid
  VARIANT 91: note = Any amino acid
  VARIANT 92: note = Any amino acid
  VARIANT 93: note = Any amino acid
  VARIANT 94: note = Any amino acid
  VARIANT 95: note = Any amino acid
  VARIANT 97: note = Any amino acid
  VARIANT 99: note = Any amino acid
  VARIANT 100: note = Any amino acid
DXXXXXXXXXXXXXXXXXXXXXXXXXXXXXXXXXXXXXXXXXXXXXXXXXXXXXEXXXXXXXXXXXXXXXXXXXXXXXXXXXXXXXXXXXXXXXXKXDXXD

SEQ ID NO: 795583 - protein, 90 aa, unidentified
  VARIANT 2: note = Any amino acid
  VARIANT 3: note = Any amino acid
  VARIANT 4: note = Any amino acid
  VARIANT 5: note = Any amino acid
  VARIANT 6: note = Any amino acid
  VARIANT 7: note = Any amino acid
  VARIANT 8: note = Any amino acid
  VARIANT 9: note = Any amino acid
  VARIANT 10: note = Any amino acid
  VARIANT 11: note = Any amino acid
  VARIANT 12: note = Any amino acid
  VARIANT 13: note = Any amino acid
  VARIANT 14: note = Any amino acid
  VARIANT 15: note = Any amino acid
  VARIANT 16: note = Any amino acid
  VARIANT 17: note = Any amino acid
  VARIANT 18: note = Any amino acid
  VARIANT 19: note = Any amino acid
  VARIANT 20: note = Any amino acid
  VARIANT 21: note = Any amino acid
  VARIANT 22: note = Any amino acid
  VARIANT 23: note = Any amino acid
  VARIANT 24: note = Any amino acid
  VARIANT 25: note = Any amino acid
  VARIANT 26: note = Any amino acid
  VARIANT 27: note = Any amino acid
  VARIANT 28: note = Any amino acid
  VARIANT 29: note = Any amino acid
  VARIANT 30: note = Any amino acid
  VARIANT 31: note = Any amino acid
  VARIANT 32: note = Any amino acid
  VARIANT 33: note = Any amino acid
  VARIANT 34: note = Any amino acid
  VARIANT 35: note = Any amino acid
  VARIANT 36: note = Any amino acid
  VARIANT 37: note = Any amino acid
  VARIANT 38: note = Any amino acid
  VARIANT 39: note = Any amino acid
  VARIANT 40: note = Any amino acid
  VARIANT 41: note = Any amino acid
  VARIANT 42: note = Any amino acid
  VARIANT 43: note = Any amino acid
  VARIANT 44: note = Any amino acid
  VARIANT 45: note = Any amino acid
  VARIANT 46: note = Any amino acid
  VARIANT 47: note = Any amino acid
  VARIANT 48: note = Any amino acid
  VARIANT 49: note = Any amino acid
  VARIANT 50: note = Any amino acid
  VARIANT 52: note = Any amino acid
  VARIANT 53: note = Any amino acid
  VARIANT 54: note = Any amino acid
  VARIANT 55: note = Any amino acid
  VARIANT 56: note = Any amino acid
  VARIANT 57: note = Any amino acid
  VARIANT 58: note = Any amino acid
  VARIANT 59: note = Any amino acid
  VARIANT 60: note = Any amino acid
  VARIANT 61: note = Any amino acid
  VARIANT 62: note = Any amino acid
  VARIANT 63: note = Any amino acid
  VARIANT 64: note = Any amino acid
  VARIANT 65: note = Any amino acid
  VARIANT 66: note = Any amino acid
  VARIANT 67: note = Any amino acid
  VARIANT 68: note = Any amino acid
  VARIANT 69: note = Any amino acid
  VARIANT 70: note = Any amino acid
  VARIANT 71: note = Any amino acid
  VARIANT 72: note = Any amino acid
  VARIANT 73: note = Any amino acid
  VARIANT 74: note = Any amino acid
  VARIANT 75: note = Any amino acid
  VARIANT 76: note = Any amino acid
  VARIANT 77: note = Any amino acid
  VARIANT 78: note = Any amino acid
  VARIANT 79: note = Any amino acid
  VARIANT 80: note = Any amino acid
  VARIANT 81: note = Any amino acid
  VARIANT 82: note = Any amino acid
  VARIANT 83: note = Any amino acid
  VARIANT 84: note = Any amino acid
  VARIANT 86: note = Any amino acid
  VARIANT 88: note = Any amino acid
  VARIANT 89: note = Any amino acid
DXXXXXXXXXXXXXXXXXXXXXXXXXXXXXXXXXXXXXXXXXXXXXXXXXEXXXXXXXXXXXXXXXXXXXXXXXXXXXXXXXXXKXDXXD

SEQ ID NO: 795584 - protein, 92 aa, unidentified
  VARIANT 2: note = Any amino acid
  VARIANT 3: note = Any amino acid
  VARIANT 4: note = Any amino acid
  VARIANT 5: note = Any amino acid
  VARIANT 6: note = Any amino acid
  VARIANT 7: note = Any amino acid
  VARIANT 8: note = Any amino acid
  VARIANT 9: note = Any amino acid
  VARIANT 10: note = Any amino acid
  VARIANT 11: note = Any amino acid
  VARIANT 12: note = Any amino acid
  VARIANT 13: note = Any amino acid
  VARIANT 14: note = Any amino acid
  VARIANT 15: note = Any amino acid
  VARIANT 16: note = Any amino acid
  VARIANT 17: note = Any amino acid
  VARIANT 18: note = Any amino acid
  VARIANT 19: note = Any amino acid
  VARIANT 20: note = Any amino acid
  VARIANT 21: note = Any amino acid
  VARIANT 22: note = Any amino acid
  VARIANT 23: note = Any amino acid
  VARIANT 24: note = Any amino acid
  VARIANT 25: note = Any amino acid
  VARIANT 26: note = Any amino acid
  VARIANT 27: note = Any amino acid
  VARIANT 28: note = Any amino acid
  VARIANT 29: note = Any amino acid
  VARIANT 30: note = Any amino acid
  VARIANT 31: note = Any amino acid
  VARIANT 32: note = Any amino acid
  VARIANT 33: note = Any amino acid
  VARIANT 34: note = Any amino acid
  VARIANT 35: note = Any amino acid
  VARIANT 36: note = Any amino acid
  VARIANT 37: note = Any amino acid
  VARIANT 38: note = Any amino acid
  VARIANT 39: note = Any amino acid
  VARIANT 40: note = Any amino acid
  VARIANT 41: note = Any amino acid
  VARIANT 42: note = Any amino acid
  VARIANT 43: note = Any amino acid
  VARIANT 44: note = Any amino acid
  VARIANT 45: note = Any amino acid
  VARIANT 46: note = Any amino acid
  VARIANT 47: note = Any amino acid
  VARIANT 48: note = Any amino acid
  VARIANT 49: note = Any amino acid
  VARIANT 50: note = Any amino acid
  VARIANT 51: note = Any amino acid
  VARIANT 53: note = Any amino acid
  VARIANT 54: note = Any amino acid
  VARIANT 55: note = Any amino acid
  VARIANT 56: note = Any amino acid
  VARIANT 57: note = Any amino acid
  VARIANT 58: note = Any amino acid
  VARIANT 59: note = Any amino acid
  VARIANT 60: note = Any amino acid
  VARIANT 61: note = Any amino acid
  VARIANT 62: note = Any amino acid
  VARIANT 63: note = Any amino acid
  VARIANT 64: note = Any amino acid
  VARIANT 65: note = Any amino acid
  VARIANT 66: note = Any amino acid
  VARIANT 67: note = Any amino acid
  VARIANT 68: note = Any amino acid
  VARIANT 69: note = Any amino acid
  VARIANT 70: note = Any amino acid
  VARIANT 71: note = Any amino acid
  VARIANT 72: note = Any amino acid
  VARIANT 73: note = Any amino acid
  VARIANT 74: note = Any amino acid
  VARIANT 75: note = Any amino acid
  VARIANT 76: note = Any amino acid
  VARIANT 77: note = Any amino acid
  VARIANT 78: note = Any amino acid
  VARIANT 79: note = Any amino acid
  VARIANT 80: note = Any amino acid
  VARIANT 81: note = Any amino acid
  VARIANT 82: note = Any amino acid
  VARIANT 83: note = Any amino acid
  VARIANT 84: note = Any amino acid
  VARIANT 85: note = Any amino acid
  VARIANT 86: note = Any amino acid
  VARIANT 88: note = Any amino acid
  VARIANT 90: note = Any amino acid
  VARIANT 91: note = Any amino acid
DXXXXXXXXXXXXXXXXXXXXXXXXXXXXXXXXXXXXXXXXXXXXXXXXXXEXXXXXXXXXXXXXXXXXXXXXXXXXXXXXXXXXXKXDXXD

SEQ ID NO: 795585 - protein, 96 aa, unidentified
  VARIANT 2: note = Any amino acid
  VARIANT 3: note = Any amino acid
  VARIANT 4: note = Any amino acid
  VARIANT 5: note = Any amino acid
  VARIANT 6: note = Any amino acid
  VARIANT 7: note = Any amino acid
  VARIANT 8: note = Any amino acid
  VARIANT 9: note = Any amino acid
  VARIANT 10: note = Any amino acid
  VARIANT 11: note = Any amino acid
  VARIANT 12: note = Any amino acid
  VARIANT 13: note = Any amino acid
  VARIANT 14: note = Any amino acid
  VARIANT 15: note = Any amino acid
  VARIANT 16: note = Any amino acid
  VARIANT 17: note = Any amino acid
  VARIANT 18: note = Any amino acid
  VARIANT 19: note = Any amino acid
  VARIANT 20: note = Any amino acid
  VARIANT 21: note = Any amino acid
  VARIANT 22: note = Any amino acid
  VARIANT 23: note = Any amino acid
  VARIANT 24: note = Any amino acid
  VARIANT 25: note = Any amino acid
  VARIANT 26: note = Any amino acid
  VARIANT 27: note = Any amino acid
  VARIANT 28: note = Any amino acid
  VARIANT 29: note = Any amino acid
  VARIANT 30: note = Any amino acid
  VARIANT 31: note = Any amino acid
  VARIANT 32: note = Any amino acid
  VARIANT 33: note = Any amino acid
  VARIANT 34: note = Any amino acid
  VARIANT 35: note = Any amino acid
  VARIANT 36: note = Any amino acid
  VARIANT 37: note = Any amino acid
  VARIANT 38: note = Any amino acid
  VARIANT 39: note = Any amino acid
  VARIANT 40: note = Any amino acid
  VARIANT 41: note = Any amino acid
  VARIANT 42: note = Any amino acid
  VARIANT 43: note = Any amino acid
  VARIANT 44: note = Any amino acid
  VARIANT 45: note = Any amino acid
  VARIANT 46: note = Any amino acid
  VARIANT 47: note = Any amino acid
  VARIANT 48: note = Any amino acid
  VARIANT 49: note = Any amino acid
  VARIANT 50: note = Any amino acid
  VARIANT 51: note = Any amino acid
  VARIANT 52: note = Any amino acid
  VARIANT 54: note = Any amino acid
  VARIANT 55: note = Any amino acid
  VARIANT 56: note = Any amino acid
  VARIANT 57: note = Any amino acid
  VARIANT 58: note = Any amino acid
  VARIANT 59: note = Any amino acid
  VARIANT 60: note = Any amino acid
  VARIANT 61: note = Any amino acid
  VARIANT 62: note = Any amino acid
  VARIANT 63: note = Any amino acid
  VARIANT 64: note = Any amino acid
  VARIANT 65: note = Any amino acid
  VARIANT 66: note = Any amino acid
  VARIANT 67: note = Any amino acid
  VARIANT 68: note = Any amino acid
  VARIANT 69: note = Any amino acid
  VARIANT 70: note = Any amino acid
  VARIANT 71: note = Any amino acid
  VARIANT 72: note = Any amino acid
  VARIANT 73: note = Any amino acid
  VARIANT 74: note = Any amino acid
  VARIANT 75: note = Any amino acid
  VARIANT 76: note = Any amino acid
  VARIANT 77: note = Any amino acid
  VARIANT 78: note = Any amino acid
  VARIANT 79: note = Any amino acid
  VARIANT 80: note = Any amino acid
  VARIANT 81: note = Any amino acid
  VARIANT 82: note = Any amino acid
  VARIANT 83: note = Any amino acid
  VARIANT 84: note = Any amino acid
  VARIANT 85: note = Any amino acid
  VARIANT 86: note = Any amino acid
  VARIANT 87: note = Any amino acid
  VARIANT 88: note = Any amino acid
  VARIANT 89: note = Any amino acid
  VARIANT 90: note = Any amino acid
  VARIANT 92: note = Any amino acid
  VARIANT 94: note = Any amino acid
  VARIANT 95: note = Any amino acid
DXXXXXXXXXXXXXXXXXXXXXXXXXXXXXXXXXXXXXXXXXXXXXXXXXXXEXXXXXXXXXXXXXXXXXXXXXXXXXXXXXXXXXXXXXKXDXXD

SEQ ID NO: 795586 - protein, 100 aa, unidentified
  VARIANT 2: note = Any amino acid
  VARIANT 3: note = Any amino acid
  VARIANT 4: note = Any amino acid
  VARIANT 5: note = Any amino acid
  VARIANT 6: note = Any amino acid
  VARIANT 7: note = Any amino acid
  VARIANT 8: note = Any amino acid
  VARIANT 9: note = Any amino acid
  VARIANT 10: note = Any amino acid
  VARIANT 11: note = Any amino acid
  VARIANT 12: note = Any amino acid
  VARIANT 13: note = Any amino acid
  VARIANT 14: note = Any amino acid
  VARIANT 15: note = Any amino acid
  VARIANT 16: note = Any amino acid
  VARIANT 17: note = Any amino acid
  VARIANT 18: note = Any amino acid
  VARIANT 19: note = Any amino acid
  VARIANT 20: note = Any amino acid
  VARIANT 21: note = Any amino acid
  VARIANT 22: note = Any amino acid
  VARIANT 23: note = Any amino acid
  VARIANT 24: note = Any amino acid
  VARIANT 25: note = Any amino acid
  VARIANT 26: note = Any amino acid
  VARIANT 27: note = Any amino acid
  VARIANT 28: note = Any amino acid
  VARIANT 29: note = Any amino acid
  VARIANT 30: note = Any amino acid
  VARIANT 31: note = Any amino acid
  VARIANT 32: note = Any amino acid
  VARIANT 33: note = Any amino acid
  VARIANT 34: note = Any amino acid
  VARIANT 35: note = Any amino acid
  VARIANT 36: note = Any amino acid
  VARIANT 37: note = Any amino acid
  VARIANT 38: note = Any amino acid
  VARIANT 39: note = Any amino acid
  VARIANT 40: note = Any amino acid
  VARIANT 41: note = Any amino acid
  VARIANT 42: note = Any amino acid
  VARIANT 43: note = Any amino acid
  VARIANT 44: note = Any amino acid
  VARIANT 45: note = Any amino acid
  VARIANT 46: note = Any amino acid
  VARIANT 47: note = Any amino acid
  VARIANT 48: note = Any amino acid
  VARIANT 49: note = Any amino acid
  VARIANT 50: note = Any amino acid
  VARIANT 51: note = Any amino acid
  VARIANT 52: note = Any amino acid
  VARIANT 53: note = Any amino acid
  VARIANT 54: note = Any amino acid
  VARIANT 56: note = Any amino acid
  VARIANT 57: note = Any amino acid
  VARIANT 58: note = Any amino acid
  VARIANT 59: note = Any amino acid
  VARIANT 60: note = Any amino acid
  VARIANT 61: note = Any amino acid
  VARIANT 62: note = Any amino acid
  VARIANT 63: note = Any amino acid
  VARIANT 64: note = Any amino acid
  VARIANT 65: note = Any amino acid
  VARIANT 66: note = Any amino acid
  VARIANT 67: note = Any amino acid
  VARIANT 68: note = Any amino acid
  VARIANT 69: note = Any amino acid
  VARIANT 70: note = Any amino acid
  VARIANT 71: note = Any amino acid
  VARIANT 72: note = Any amino acid
  VARIANT 73: note = Any amino acid
  VARIANT 74: note = Any amino acid
  VARIANT 75: note = Any amino acid
  VARIANT 76: note = Any amino acid
  VARIANT 77: note = Any amino acid
  VARIANT 78: note = Any amino acid
  VARIANT 79: note = Any amino acid
  VARIANT 80: note = Any amino acid
  VARIANT 81: note = Any amino acid
  VARIANT 82: note = Any amino acid
  VARIANT 83: note = Any amino acid
  VARIANT 84: note = Any amino acid
  VARIANT 85: note = Any amino acid
  VARIANT 86: note = Any amino acid
  VARIANT 87: note = Any amino acid
  VARIANT 88: note = Any amino acid
  VARIANT 89: note = Any amino acid
  VARIANT 90: note = Any amino acid
  VARIANT 91: note = Any amino acid
  VARIANT 92: note = Any amino acid
  VARIANT 93: note = Any amino acid
  VARIANT 94: note = Any amino acid
  VARIANT 96: note = Any amino acid
  VARIANT 98: note = Any amino acid
  VARIANT 99: note = Any amino acid
DXXXXXXXXXXXXXXXXXXXXXXXXXXXXXXXXXXXXXXXXXXXXXXXXXXXXXEXXXXXXXXXXXXXXXXXXXXXXXXXXXXXXXXXXXXXXXKXDXXD

SEQ ID NO: 795587 - protein, 93 aa, unidentified
  VARIANT 2: note = Any amino acid
  VARIANT 3: note = Any amino acid
  VARIANT 4: note = Any amino acid
  VARIANT 5: note = Any amino acid
  VARIANT 6: note = Any amino acid
  VARIANT 7: note = Any amino acid
  VARIANT 8: note = Any amino acid
  VARIANT 9: note = Any amino acid
  VARIANT 10: note = Any amino acid
  VARIANT 11: note = Any amino acid
  VARIANT 12: note = Any amino acid
  VARIANT 13: note = Any amino acid
  VARIANT 14: note = Any amino acid
  VARIANT 15: note = Any amino acid
  VARIANT 16: note = Any amino acid
  VARIANT 17: note = Any amino acid
  VARIANT 18: note = Any amino acid
  VARIANT 19: note = Any amino acid
  VARIANT 20: note = Any amino acid
  VARIANT 21: note = Any amino acid
  VARIANT 22: note = Any amino acid
  VARIANT 23: note = Any amino acid
  VARIANT 24: note = Any amino acid
  VARIANT 25: note = Any amino acid
  VARIANT 26: note = Any amino acid
  VARIANT 27: note = Any amino acid
  VARIANT 28: note = Any amino acid
  VARIANT 29: note = Any amino acid
  VARIANT 30: note = Any amino acid
  VARIANT 31: note = Any amino acid
  VARIANT 32: note = Any amino acid
  VARIANT 33: note = Any amino acid
  VARIANT 34: note = Any amino acid
  VARIANT 35: note = Any amino acid
  VARIANT 36: note = Any amino acid
  VARIANT 37: note = Any amino acid
  VARIANT 38: note = Any amino acid
  VARIANT 39: note = Any amino acid
  VARIANT 40: note = Any amino acid
  VARIANT 41: note = Any amino acid
  VARIANT 42: note = Any amino acid
  VARIANT 43: note = Any amino acid
  VARIANT 44: note = Any amino acid
  VARIANT 45: note = Any amino acid
  VARIANT 46: note = Any amino acid
  VARIANT 47: note = Any amino acid
  VARIANT 49: note = Any amino acid
  VARIANT 50: note = Any amino acid
  VARIANT 51: note = Any amino acid
  VARIANT 52: note = Any amino acid
  VARIANT 53: note = Any amino acid
  VARIANT 54: note = Any amino acid
  VARIANT 55: note = Any amino acid
  VARIANT 56: note = Any amino acid
  VARIANT 57: note = Any amino acid
  VARIANT 58: note = Any amino acid
  VARIANT 59: note = Any amino acid
  VARIANT 60: note = Any amino acid
  VARIANT 61: note = Any amino acid
  VARIANT 62: note = Any amino acid
  VARIANT 63: note = Any amino acid
  VARIANT 64: note = Any amino acid
  VARIANT 65: note = Any amino acid
  VARIANT 66: note = Any amino acid
  VARIANT 67: note = Any amino acid
  VARIANT 68: note = Any amino acid
  VARIANT 69: note = Any amino acid
  VARIANT 70: note = Any amino acid
  VARIANT 71: note = Any amino acid
  VARIANT 72: note = Any amino acid
  VARIANT 73: note = Any amino acid
  VARIANT 74: note = Any amino acid
  VARIANT 75: note = Any amino acid
  VARIANT 76: note = Any amino acid
  VARIANT 77: note = Any amino acid
  VARIANT 78: note = Any amino acid
  VARIANT 79: note = Any amino acid
  VARIANT 80: note = Any amino acid
  VARIANT 81: note = Any amino acid
  VARIANT 82: note = Any amino acid
  VARIANT 83: note = Any amino acid
  VARIANT 84: note = Any amino acid
  VARIANT 85: note = Any amino acid
  VARIANT 86: note = Any amino acid
  VARIANT 87: note = Any amino acid
  VARIANT 89: note = Any amino acid
  VARIANT 91: note = Any amino acid
  VARIANT 92: note = Any amino acid
DXXXXXXXXXXXXXXXXXXXXXXXXXXXXXXXXXXXXXXXXXXXXXXEXXXXXXXXXXXXXXXXXXXXXXXXXXXXXXXXXXXXXXXKXDXXD

SEQ ID NO: 795588 - protein, 97 aa, unidentified
  VARIANT 2: note = Any amino acid
  VARIANT 3: note = Any amino acid
  VARIANT 4: note = Any amino acid
  VARIANT 5: note = Any amino acid
  VARIANT 6: note = Any amino acid
  VARIANT 7: note = Any amino acid
  VARIANT 8: note = Any amino acid
  VARIANT 9: note = Any amino acid
  VARIANT 10: note = Any amino acid
  VARIANT 11: note = Any amino acid
  VARIANT 12: note = Any amino acid
  VARIANT 13: note = Any amino acid
  VARIANT 14: note = Any amino acid
  VARIANT 15: note = Any amino acid
  VARIANT 16: note = Any amino acid
  VARIANT 17: note = Any amino acid
  VARIANT 18: note = Any amino acid
  VARIANT 19: note = Any amino acid
  VARIANT 20: note = Any amino acid
  VARIANT 21: note = Any amino acid
  VARIANT 22: note = Any amino acid
  VARIANT 23: note = Any amino acid
  VARIANT 24: note = Any amino acid
  VARIANT 25: note = Any amino acid
  VARIANT 26: note = Any amino acid
  VARIANT 27: note = Any amino acid
  VARIANT 28: note = Any amino acid
  VARIANT 29: note = Any amino acid
  VARIANT 30: note = Any amino acid
  VARIANT 31: note = Any amino acid
  VARIANT 32: note = Any amino acid
  VARIANT 33: note = Any amino acid
  VARIANT 34: note = Any amino acid
  VARIANT 35: note = Any amino acid
  VARIANT 36: note = Any amino acid
  VARIANT 37: note = Any amino acid
  VARIANT 38: note = Any amino acid
  VARIANT 39: note = Any amino acid
  VARIANT 40: note = Any amino acid
  VARIANT 41: note = Any amino acid
  VARIANT 42: note = Any amino acid
  VARIANT 43: note = Any amino acid
  VARIANT 44: note = Any amino acid
  VARIANT 45: note = Any amino acid
  VARIANT 46: note = Any amino acid
  VARIANT 47: note = Any amino acid
  VARIANT 48: note = Any amino acid
  VARIANT 49: note = Any amino acid
  VARIANT 50: note = Any amino acid
  VARIANT 51: note = Any amino acid
  VARIANT 52: note = Any amino acid
  VARIANT 53: note = Any amino acid
  VARIANT 55: note = Any amino acid
  VARIANT 56: note = Any amino acid
  VARIANT 57: note = Any amino acid
  VARIANT 58: note = Any amino acid
  VARIANT 59: note = Any amino acid
  VARIANT 60: note = Any amino acid
  VARIANT 61: note = Any amino acid
  VARIANT 62: note = Any amino acid
  VARIANT 63: note = Any amino acid
  VARIANT 64: note = Any amino acid
  VARIANT 65: note = Any amino acid
  VARIANT 66: note = Any amino acid
  VARIANT 67: note = Any amino acid
  VARIANT 68: note = Any amino acid
  VARIANT 69: note = Any amino acid
  VARIANT 70: note = Any amino acid
  VARIANT 71: note = Any amino acid
  VARIANT 72: note = Any amino acid
  VARIANT 73: note = Any amino acid
  VARIANT 74: note = Any amino acid
  VARIANT 75: note = Any amino acid
  VARIANT 76: note = Any amino acid
  VARIANT 77: note = Any amino acid
  VARIANT 78: note = Any amino acid
  VARIANT 79: note = Any amino acid
  VARIANT 80: note = Any amino acid
  VARIANT 81: note = Any amino acid
  VARIANT 82: note = Any amino acid
  VARIANT 83: note = Any amino acid
  VARIANT 84: note = Any amino acid
  VARIANT 85: note = Any amino acid
  VARIANT 86: note = Any amino acid
  VARIANT 87: note = Any amino acid
  VARIANT 88: note = Any amino acid
  VARIANT 89: note = Any amino acid
  VARIANT 90: note = Any amino acid
  VARIANT 91: note = Any amino acid
  VARIANT 93: note = Any amino acid
  VARIANT 95: note = Any amino acid
  VARIANT 96: note = Any amino acid
DXXXXXXXXXXXXXXXXXXXXXXXXXXXXXXXXXXXXXXXXXXXXXXXXXXXXEXXXXXXXXXXXXXXXXXXXXXXXXXXXXXXXXXXXXXKXDXXD

SEQ ID NO: 795589 - protein, 96 aa, unidentified
  VARIANT 2: note = Any amino acid
  VARIANT 3: note = Any amino acid
  VARIANT 4: note = Any amino acid
  VARIANT 5: note = Any amino acid
  VARIANT 6: note = Any amino acid
  VARIANT 7: note = Any amino acid
  VARIANT 8: note = Any amino acid
  VARIANT 9: note = Any amino acid
  VARIANT 10: note = Any amino acid
  VARIANT 11: note = Any amino acid
  VARIANT 12: note = Any amino acid
  VARIANT 13: note = Any amino acid
  VARIANT 14: note = Any amino acid
  VARIANT 15: note = Any amino acid
  VARIANT 16: note = Any amino acid
  VARIANT 17: note = Any amino acid
  VARIANT 18: note = Any amino acid
  VARIANT 19: note = Any amino acid
  VARIANT 20: note = Any amino acid
  VARIANT 21: note = Any amino acid
  VARIANT 22: note = Any amino acid
  VARIANT 23: note = Any amino acid
  VARIANT 24: note = Any amino acid
  VARIANT 25: note = Any amino acid
  VARIANT 26: note = Any amino acid
  VARIANT 27: note = Any amino acid
  VARIANT 28: note = Any amino acid
  VARIANT 29: note = Any amino acid
  VARIANT 30: note = Any amino acid
  VARIANT 31: note = Any amino acid
  VARIANT 32: note = Any amino acid
  VARIANT 33: note = Any amino acid
  VARIANT 34: note = Any amino acid
  VARIANT 35: note = Any amino acid
  VARIANT 36: note = Any amino acid
  VARIANT 37: note = Any amino acid
  VARIANT 38: note = Any amino acid
  VARIANT 39: note = Any amino acid
  VARIANT 40: note = Any amino acid
  VARIANT 41: note = Any amino acid
  VARIANT 42: note = Any amino acid
  VARIANT 43: note = Any amino acid
  VARIANT 44: note = Any amino acid
  VARIANT 45: note = Any amino acid
  VARIANT 46: note = Any amino acid
  VARIANT 47: note = Any amino acid
  VARIANT 48: note = Any amino acid
  VARIANT 49: note = Any amino acid
  VARIANT 51: note = Any amino acid
  VARIANT 52: note = Any amino acid
  VARIANT 53: note = Any amino acid
  VARIANT 54: note = Any amino acid
  VARIANT 55: note = Any amino acid
  VARIANT 56: note = Any amino acid
  VARIANT 57: note = Any amino acid
  VARIANT 58: note = Any amino acid
  VARIANT 59: note = Any amino acid
  VARIANT 60: note = Any amino acid
  VARIANT 61: note = Any amino acid
  VARIANT 62: note = Any amino acid
  VARIANT 63: note = Any amino acid
  VARIANT 64: note = Any amino acid
  VARIANT 65: note = Any amino acid
  VARIANT 66: note = Any amino acid
  VARIANT 67: note = Any amino acid
  VARIANT 68: note = Any amino acid
  VARIANT 69: note = Any amino acid
  VARIANT 70: note = Any amino acid
  VARIANT 71: note = Any amino acid
  VARIANT 72: note = Any amino acid
  VARIANT 73: note = Any amino acid
  VARIANT 74: note = Any amino acid
  VARIANT 75: note = Any amino acid
  VARIANT 76: note = Any amino acid
  VARIANT 77: note = Any amino acid
  VARIANT 78: note = Any amino acid
  VARIANT 79: note = Any amino acid
  VARIANT 80: note = Any amino acid
  VARIANT 81: note = Any amino acid
  VARIANT 82: note = Any amino acid
  VARIANT 83: note = Any amino acid
  VARIANT 84: note = Any amino acid
  VARIANT 85: note = Any amino acid
  VARIANT 86: note = Any amino acid
  VARIANT 87: note = Any amino acid
  VARIANT 88: note = Any amino acid
  VARIANT 89: note = Any amino acid
  VARIANT 90: note = Any amino acid
  VARIANT 92: note = Any amino acid
  VARIANT 94: note = Any amino acid
  VARIANT 95: note = Any amino acid
DXXXXXXXXXXXXXXXXXXXXXXXXXXXXXXXXXXXXXXXXXXXXXXXXAXXXXXXXXXXXXXXXXXXXXXXXXXXXXXXXXXXXXXXXXKXDXXD

SEQ ID NO: 795590 - protein, 95 aa, unidentified
  VARIANT 2: note = Any amino acid
  VARIANT 3: note = Any amino acid
  VARIANT 4: note = Any amino acid
  VARIANT 5: note = Any amino acid
  VARIANT 6: note = Any amino acid
  VARIANT 7: note = Any amino acid
  VARIANT 8: note = Any amino acid
  VARIANT 9: note = Any amino acid
  VARIANT 10: note = Any amino acid
  VARIANT 11: note = Any amino acid
  VARIANT 12: note = Any amino acid
  VARIANT 13: note = Any amino acid
  VARIANT 14: note = Any amino acid
  VARIANT 15: note = Any amino acid
  VARIANT 16: note = Any amino acid
  VARIANT 17: note = Any amino acid
  VARIANT 18: note = Any amino acid
  VARIANT 19: note = Any amino acid
  VARIANT 20: note = Any amino acid
  VARIANT 21: note = Any amino acid
  VARIANT 22: note = Any amino acid
  VARIANT 23: note = Any amino acid
  VARIANT 24: note = Any amino acid
  VARIANT 25: note = Any amino acid
  VARIANT 26: note = Any amino acid
  VARIANT 27: note = Any amino acid
  VARIANT 28: note = Any amino acid
  VARIANT 29: note = Any amino acid
  VARIANT 30: note = Any amino acid
  VARIANT 31: note = Any amino acid
  VARIANT 32: note = Any amino acid
  VARIANT 33: note = Any amino acid
  VARIANT 34: note = Any amino acid
  VARIANT 35: note = Any amino acid
  VARIANT 36: note = Any amino acid
  VARIANT 37: note = Any amino acid
  VARIANT 38: note = Any amino acid
  VARIANT 39: note = Any amino acid
  VARIANT 40: note = Any amino acid
  VARIANT 41: note = Any amino acid
  VARIANT 42: note = Any amino acid
  VARIANT 43: note = Any amino acid
  VARIANT 44: note = Any amino acid
  VARIANT 45: note = Any amino acid
  VARIANT 46: note = Any amino acid
  VARIANT 47: note = Any amino acid
  VARIANT 48: note = Any amino acid
  VARIANT 49: note = Any amino acid
  VARIANT 50: note = Any amino acid
  VARIANT 51: note = Any amino acid
  VARIANT 52: note = Any amino acid
  VARIANT 53: note = Any amino acid
  VARIANT 55: note = Any amino acid
  VARIANT 56: note = Any amino acid
  VARIANT 57: note = Any amino acid
  VARIANT 58: note = Any amino acid
  VARIANT 59: note = Any amino acid
  VARIANT 60: note = Any amino acid
  VARIANT 61: note = Any amino acid
  VARIANT 62: note = Any amino acid
  VARIANT 63: note = Any amino acid
  VARIANT 64: note = Any amino acid
  VARIANT 65: note = Any amino acid
  VARIANT 66: note = Any amino acid
  VARIANT 67: note = Any amino acid
  VARIANT 68: note = Any amino acid
  VARIANT 69: note = Any amino acid
  VARIANT 70: note = Any amino acid
  VARIANT 71: note = Any amino acid
  VARIANT 72: note = Any amino acid
  VARIANT 73: note = Any amino acid
  VARIANT 74: note = Any amino acid
  VARIANT 75: note = Any amino acid
  VARIANT 76: note = Any amino acid
  VARIANT 77: note = Any amino acid
  VARIANT 78: note = Any amino acid
  VARIANT 79: note = Any amino acid
  VARIANT 80: note = Any amino acid
  VARIANT 81: note = Any amino acid
  VARIANT 82: note = Any amino acid
  VARIANT 83: note = Any amino acid
  VARIANT 84: note = Any amino acid
  VARIANT 85: note = Any amino acid
  VARIANT 86: note = Any amino acid
  VARIANT 87: note = Any amino acid
  VARIANT 88: note = Any amino acid
  VARIANT 89: note = Any amino acid
  VARIANT 91: note = Any amino acid
  VARIANT 93: note = Any amino acid
  VARIANT 94: note = Any amino acid
DXXXXXXXXXXXXXXXXXXXXXXXXXXXXXXXXXXXXXXXXXXXXXXXXXXXXEXXXXXXXXXXXXXXXXXXXXXXXXXXXXXXXXXXXKXDXXD

SEQ ID NO: 795591 - protein, 97 aa, unidentified
  VARIANT 2: note = Any amino acid
  VARIANT 3: note = Any amino acid
  VARIANT 4: note = Any amino acid
  VARIANT 5: note = Any amino acid
  VARIANT 6: note = Any amino acid
  VARIANT 7: note = Any amino acid
  VARIANT 8: note = Any amino acid
  VARIANT 9: note = Any amino acid
  VARIANT 10: note = Any amino acid
  VARIANT 11: note = Any amino acid
  VARIANT 12: note = Any amino acid
  VARIANT 13: note = Any amino acid
  VARIANT 14: note = Any amino acid
  VARIANT 15: note = Any amino acid
  VARIANT 16: note = Any amino acid
  VARIANT 17: note = Any amino acid
  VARIANT 18: note = Any amino acid
  VARIANT 19: note = Any amino acid
  VARIANT 20: note = Any amino acid
  VARIANT 21: note = Any amino acid
  VARIANT 22: note = Any amino acid
  VARIANT 23: note = Any amino acid
  VARIANT 24: note = Any amino acid
  VARIANT 25: note = Any amino acid
  VARIANT 26: note = Any amino acid
  VARIANT 27: note = Any amino acid
  VARIANT 28: note = Any amino acid
  VARIANT 29: note = Any amino acid
  VARIANT 30: note = Any amino acid
  VARIANT 31: note = Any amino acid
  VARIANT 32: note = Any amino acid
  VARIANT 33: note = Any amino acid
  VARIANT 34: note = Any amino acid
  VARIANT 35: note = Any amino acid
  VARIANT 36: note = Any amino acid
  VARIANT 37: note = Any amino acid
  VARIANT 38: note = Any amino acid
  VARIANT 39: note = Any amino acid
  VARIANT 40: note = Any amino acid
  VARIANT 41: note = Any amino acid
  VARIANT 42: note = Any amino acid
  VARIANT 43: note = Any amino acid
  VARIANT 44: note = Any amino acid
  VARIANT 45: note = Any amino acid
  VARIANT 46: note = Any amino acid
  VARIANT 47: note = Any amino acid
  VARIANT 48: note = Any amino acid
  VARIANT 49: note = Any amino acid
  VARIANT 50: note = Any amino acid
  VARIANT 51: note = Any amino acid
  VARIANT 53: note = Any amino acid
  VARIANT 54: note = Any amino acid
  VARIANT 55: note = Any amino acid
  VARIANT 56: note = Any amino acid
  VARIANT 57: note = Any amino acid
  VARIANT 58: note = Any amino acid
  VARIANT 59: note = Any amino acid
  VARIANT 60: note = Any amino acid
  VARIANT 61: note = Any amino acid
  VARIANT 62: note = Any amino acid
  VARIANT 63: note = Any amino acid
  VARIANT 64: note = Any amino acid
  VARIANT 65: note = Any amino acid
  VARIANT 66: note = Any amino acid
  VARIANT 67: note = Any amino acid
  VARIANT 68: note = Any amino acid
  VARIANT 69: note = Any amino acid
  VARIANT 70: note = Any amino acid
  VARIANT 71: note = Any amino acid
  VARIANT 72: note = Any amino acid
  VARIANT 73: note = Any amino acid
  VARIANT 74: note = Any amino acid
  VARIANT 75: note = Any amino acid
  VARIANT 76: note = Any amino acid
  VARIANT 77: note = Any amino acid
  VARIANT 78: note = Any amino acid
  VARIANT 79: note = Any amino acid
  VARIANT 80: note = Any amino acid
  VARIANT 81: note = Any amino acid
  VARIANT 82: note = Any amino acid
  VARIANT 83: note = Any amino acid
  VARIANT 84: note = Any amino acid
  VARIANT 85: note = Any amino acid
  VARIANT 86: note = Any amino acid
  VARIANT 87: note = Any amino acid
  VARIANT 88: note = Any amino acid
  VARIANT 89: note = Any amino acid
  VARIANT 90: note = Any amino acid
  VARIANT 91: note = Any amino acid
  VARIANT 93: note = Any amino acid
  VARIANT 95: note = Any amino acid
  VARIANT 96: note = Any amino acid
DXXXXXXXXXXXXXXXXXXXXXXXXXXXXXXXXXXXXXXXXXXXXXXXXXXAXXXXXXXXXXXXXXXXXXXXXXXXXXXXXXXXXXXXXXXKXDXXD

SEQ ID NO: 795592 - protein, 100 aa, unidentified
  VARIANT 2: note = Any amino acid
  VARIANT 3: note = Any amino acid
  VARIANT 4: note = Any amino acid
  VARIANT 5: note = Any amino acid
  VARIANT 6: note = Any amino acid
  VARIANT 7: note = Any amino acid
  VARIANT 8: note = Any amino acid
  VARIANT 9: note = Any amino acid
  VARIANT 10: note = Any amino acid
  VARIANT 11: note = Any amino acid
  VARIANT 12: note = Any amino acid
  VARIANT 13: note = Any amino acid
  VARIANT 14: note = Any amino acid
  VARIANT 15: note = Any amino acid
  VARIANT 16: note = Any amino acid
  VARIANT 17: note = Any amino acid
  VARIANT 18: note = Any amino acid
  VARIANT 19: note = Any amino acid
  VARIANT 20: note = Any amino acid
  VARIANT 21: note = Any amino acid
  VARIANT 22: note = Any amino acid
  VARIANT 23: note = Any amino acid
  VARIANT 24: note = Any amino acid
  VARIANT 25: note = Any amino acid
  VARIANT 26: note = Any amino acid
  VARIANT 27: note = Any amino acid
  VARIANT 28: note = Any amino acid
  VARIANT 29: note = Any amino acid
  VARIANT 30: note = Any amino acid
  VARIANT 31: note = Any amino acid
  VARIANT 32: note = Any amino acid
  VARIANT 33: note = Any amino acid
  VARIANT 34: note = Any amino acid
  VARIANT 35: note = Any amino acid
  VARIANT 36: note = Any amino acid
  VARIANT 37: note = Any amino acid
  VARIANT 38: note = Any amino acid
  VARIANT 39: note = Any amino acid
  VARIANT 40: note = Any amino acid
  VARIANT 41: note = Any amino acid
  VARIANT 42: note = Any amino acid
  VARIANT 43: note = Any amino acid
  VARIANT 44: note = Any amino acid
  VARIANT 45: note = Any amino acid
  VARIANT 46: note = Any amino acid
  VARIANT 47: note = Any amino acid
  VARIANT 48: note = Any amino acid
  VARIANT 49: note = Any amino acid
  VARIANT 50: note = Any amino acid
  VARIANT 51: note = Any amino acid
  VARIANT 52: note = Any amino acid
  VARIANT 53: note = Any amino acid
  VARIANT 55: note = Any amino acid
  VARIANT 56: note = Any amino acid
  VARIANT 57: note = Any amino acid
  VARIANT 58: note = Any amino acid
  VARIANT 59: note = Any amino acid
  VARIANT 60: note = Any amino acid
  VARIANT 61: note = Any amino acid
  VARIANT 62: note = Any amino acid
  VARIANT 63: note = Any amino acid
  VARIANT 64: note = Any amino acid
  VARIANT 65: note = Any amino acid
  VARIANT 66: note = Any amino acid
  VARIANT 67: note = Any amino acid
  VARIANT 68: note = Any amino acid
  VARIANT 69: note = Any amino acid
  VARIANT 70: note = Any amino acid
  VARIANT 71: note = Any amino acid
  VARIANT 72: note = Any amino acid
  VARIANT 73: note = Any amino acid
  VARIANT 74: note = Any amino acid
  VARIANT 75: note = Any amino acid
  VARIANT 76: note = Any amino acid
  VARIANT 77: note = Any amino acid
  VARIANT 78: note = Any amino acid
  VARIANT 79: note = Any amino acid
  VARIANT 80: note = Any amino acid
  VARIANT 81: note = Any amino acid
  VARIANT 82: note = Any amino acid
  VARIANT 83: note = Any amino acid
  VARIANT 84: note = Any amino acid
  VARIANT 85: note = Any amino acid
  VARIANT 86: note = Any amino acid
  VARIANT 87: note = Any amino acid
  VARIANT 88: note = Any amino acid
  VARIANT 89: note = Any amino acid
  VARIANT 90: note = Any amino acid
  VARIANT 91: note = Any amino acid
  VARIANT 92: note = Any amino acid
  VARIANT 93: note = Any amino acid
  VARIANT 94: note = Any amino acid
  VARIANT 96: note = Any amino acid
  VARIANT 98: note = Any amino acid
  VARIANT 99: note = Any amino acid
DXXXXXXXXXXXXXXXXXXXXXXXXXXXXXXXXXXXXXXXXXXXXXXXXXXXXEXXXXXXXXXXXXXXXXXXXXXXXXXXXXXXXXXXXXXXXXKXDXXD

SEQ ID NO: 795593 - protein, 87 aa, unidentified
  VARIANT 2: note = Any amino acid
  VARIANT 3: note = Any amino acid
  VARIANT 4: note = Any amino acid
  VARIANT 5: note = Any amino acid
  VARIANT 6: note = Any amino acid
  VARIANT 7: note = Any amino acid
  VARIANT 8: note = Any amino acid
  VARIANT 9: note = Any amino acid
  VARIANT 10: note = Any amino acid
  VARIANT 11: note = Any amino acid
  VARIANT 12: note = Any amino acid
  VARIANT 13: note = Any amino acid
  VARIANT 14: note = Any amino acid
  VARIANT 15: note = Any amino acid
  VARIANT 16: note = Any amino acid
  VARIANT 17: note = Any amino acid
  VARIANT 18: note = Any amino acid
  VARIANT 19: note = Any amino acid
  VARIANT 20: note = Any amino acid
  VARIANT 21: note = Any amino acid
  VARIANT 22: note = Any amino acid
  VARIANT 23: note = Any amino acid
  VARIANT 24: note = Any amino acid
  VARIANT 25: note = Any amino acid
  VARIANT 26: note = Any amino acid
  VARIANT 27: note = Any amino acid
  VARIANT 28: note = Any amino acid
  VARIANT 29: note = Any amino acid
  VARIANT 30: note = Any amino acid
  VARIANT 31: note = Any amino acid
  VARIANT 32: note = Any amino acid
  VARIANT 33: note = Any amino acid
  VARIANT 34: note = Any amino acid
  VARIANT 35: note = Any amino acid
  VARIANT 36: note = Any amino acid
  VARIANT 37: note = Any amino acid
  VARIANT 38: note = Any amino acid
  VARIANT 39: note = Any amino acid
  VARIANT 40: note = Any amino acid
  VARIANT 41: note = Any amino acid
  VARIANT 43: note = Any amino acid
  VARIANT 44: note = Any amino acid
  VARIANT 45: note = Any amino acid
  VARIANT 46: note = Any amino acid
  VARIANT 47: note = Any amino acid
  VARIANT 48: note = Any amino acid
  VARIANT 49: note = Any amino acid
  VARIANT 50: note = Any amino acid
  VARIANT 51: note = Any amino acid
  VARIANT 52: note = Any amino acid
  VARIANT 53: note = Any amino acid
  VARIANT 54: note = Any amino acid
  VARIANT 55: note = Any amino acid
  VARIANT 56: note = Any amino acid
  VARIANT 57: note = Any amino acid
  VARIANT 58: note = Any amino acid
  VARIANT 59: note = Any amino acid
  VARIANT 60: note = Any amino acid
  VARIANT 61: note = Any amino acid
  VARIANT 62: note = Any amino acid
  VARIANT 63: note = Any amino acid
  VARIANT 64: note = Any amino acid
  VARIANT 65: note = Any amino acid
  VARIANT 66: note = Any amino acid
  VARIANT 67: note = Any amino acid
  VARIANT 68: note = Any amino acid
  VARIANT 69: note = Any amino acid
  VARIANT 70: note = Any amino acid
  VARIANT 71: note = Any amino acid
  VARIANT 72: note = Any amino acid
  VARIANT 73: note = Any amino acid
  VARIANT 74: note = Any amino acid
  VARIANT 75: note = Any amino acid
  VARIANT 76: note = Any amino acid
  VARIANT 77: note = Any amino acid
  VARIANT 78: note = Any amino acid
  VARIANT 79: note = Any amino acid
  VARIANT 80: note = Any amino acid
  VARIANT 81: note = Any amino acid
  VARIANT 83: note = Any amino acid
  VARIANT 85: note = Any amino acid
  VARIANT 86: note = Any amino acid
DXXXXXXXXXXXXXXXXXXXXXXXXXXXXXXXXXXXXXXXXEXXXXXXXXXXXXXXXXXXXXXXXXXXXXXXXXXXXXXXXKXDXXD

SEQ ID NO: 795594 - protein, 96 aa, unidentified
  VARIANT 2: note = Any amino acid
  VARIANT 3: note = Any amino acid
  VARIANT 4: note = Any amino acid
  VARIANT 5: note = Any amino acid
  VARIANT 6: note = Any amino acid
  VARIANT 7: note = Any amino acid
  VARIANT 8: note = Any amino acid
  VARIANT 9: note = Any amino acid
  VARIANT 10: note = Any amino acid
  VARIANT 11: note = Any amino acid
  VARIANT 12: note = Any amino acid
  VARIANT 13: note = Any amino acid
  VARIANT 14: note = Any amino acid
  VARIANT 15: note = Any amino acid
  VARIANT 16: note = Any amino acid
  VARIANT 17: note = Any amino acid
  VARIANT 18: note = Any amino acid
  VARIANT 19: note = Any amino acid
  VARIANT 20: note = Any amino acid
  VARIANT 21: note = Any amino acid
  VARIANT 22: note = Any amino acid
  VARIANT 23: note = Any amino acid
  VARIANT 24: note = Any amino acid
  VARIANT 25: note = Any amino acid
  VARIANT 26: note = Any amino acid
  VARIANT 27: note = Any amino acid
  VARIANT 28: note = Any amino acid
  VARIANT 29: note = Any amino acid
  VARIANT 30: note = Any amino acid
  VARIANT 31: note = Any amino acid
  VARIANT 32: note = Any amino acid
  VARIANT 33: note = Any amino acid
  VARIANT 34: note = Any amino acid
  VARIANT 35: note = Any amino acid
  VARIANT 36: note = Any amino acid
  VARIANT 37: note = Any amino acid
  VARIANT 38: note = Any amino acid
  VARIANT 39: note = Any amino acid
  VARIANT 40: note = Any amino acid
  VARIANT 41: note = Any amino acid
  VARIANT 42: note = Any amino acid
  VARIANT 43: note = Any amino acid
  VARIANT 44: note = Any amino acid
  VARIANT 45: note = Any amino acid
  VARIANT 46: note = Any amino acid
  VARIANT 47: note = Any amino acid
  VARIANT 48: note = Any amino acid
  VARIANT 49: note = Any amino acid
  VARIANT 51: note = Any amino acid
  VARIANT 52: note = Any amino acid
  VARIANT 53: note = Any amino acid
  VARIANT 54: note = Any amino acid
  VARIANT 55: note = Any amino acid
  VARIANT 56: note = Any amino acid
  VARIANT 57: note = Any amino acid
  VARIANT 58: note = Any amino acid
  VARIANT 59: note = Any amino acid
  VARIANT 60: note = Any amino acid
  VARIANT 61: note = Any amino acid
  VARIANT 62: note = Any amino acid
  VARIANT 63: note = Any amino acid
  VARIANT 64: note = Any amino acid
  VARIANT 65: note = Any amino acid
  VARIANT 66: note = Any amino acid
  VARIANT 67: note = Any amino acid
  VARIANT 68: note = Any amino acid
  VARIANT 69: note = Any amino acid
  VARIANT 70: note = Any amino acid
  VARIANT 71: note = Any amino acid
  VARIANT 72: note = Any amino acid
  VARIANT 73: note = Any amino acid
  VARIANT 74: note = Any amino acid
  VARIANT 75: note = Any amino acid
  VARIANT 76: note = Any amino acid
  VARIANT 77: note = Any amino acid
  VARIANT 78: note = Any amino acid
  VARIANT 79: note = Any amino acid
  VARIANT 80: note = Any amino acid
  VARIANT 81: note = Any amino acid
  VARIANT 82: note = Any amino acid
  VARIANT 83: note = Any amino acid
  VARIANT 84: note = Any amino acid
  VARIANT 85: note = Any amino acid
  VARIANT 86: note = Any amino acid
  VARIANT 87: note = Any amino acid
  VARIANT 88: note = Any amino acid
  VARIANT 89: note = Any amino acid
  VARIANT 90: note = Any amino acid
  VARIANT 92: note = Any amino acid
  VARIANT 94: note = Any amino acid
  VARIANT 95: note = Any amino acid
DXXXXXXXXXXXXXXXXXXXXXXXXXXXXXXXXXXXXXXXXXXXXXXXXCXXXXXXXXXXXXXXXXXXXXXXXXXXXXXXXXXXXXXXXXKXDXXD

SEQ ID NO: 795595 - protein, 101 aa, unidentified
  VARIANT 2: note = Any amino acid
  VARIANT 3: note = Any amino acid
  VARIANT 4: note = Any amino acid
  VARIANT 5: note = Any amino acid
  VARIANT 6: note = Any amino acid
  VARIANT 7: note = Any amino acid
  VARIANT 8: note = Any amino acid
  VARIANT 9: note = Any amino acid
  VARIANT 10: note = Any amino acid
  VARIANT 11: note = Any amino acid
  VARIANT 12: note = Any amino acid
  VARIANT 13: note = Any amino acid
  VARIANT 14: note = Any amino acid
  VARIANT 15: note = Any amino acid
  VARIANT 16: note = Any amino acid
  VARIANT 17: note = Any amino acid
  VARIANT 18: note = Any amino acid
  VARIANT 19: note = Any amino acid
  VARIANT 20: note = Any amino acid
  VARIANT 21: note = Any amino acid
  VARIANT 22: note = Any amino acid
  VARIANT 23: note = Any amino acid
  VARIANT 24: note = Any amino acid
  VARIANT 25: note = Any amino acid
  VARIANT 26: note = Any amino acid
  VARIANT 27: note = Any amino acid
  VARIANT 28: note = Any amino acid
  VARIANT 29: note = Any amino acid
  VARIANT 30: note = Any amino acid
  VARIANT 31: note = Any amino acid
  VARIANT 32: note = Any amino acid
  VARIANT 33: note = Any amino acid
  VARIANT 34: note = Any amino acid
  VARIANT 35: note = Any amino acid
  VARIANT 36: note = Any amino acid
  VARIANT 37: note = Any amino acid
  VARIANT 38: note = Any amino acid
  VARIANT 39: note = Any amino acid
  VARIANT 40: note = Any amino acid
  VARIANT 41: note = Any amino acid
  VARIANT 42: note = Any amino acid
  VARIANT 43: note = Any amino acid
  VARIANT 44: note = Any amino acid
  VARIANT 45: note = Any amino acid
  VARIANT 46: note = Any amino acid
  VARIANT 47: note = Any amino acid
  VARIANT 48: note = Any amino acid
  VARIANT 49: note = Any amino acid
  VARIANT 50: note = Any amino acid
  VARIANT 51: note = Any amino acid
  VARIANT 52: note = Any amino acid
  VARIANT 53: note = Any amino acid
  VARIANT 54: note = Any amino acid
  VARIANT 55: note = Any amino acid
  VARIANT 57: note = Any amino acid
  VARIANT 58: note = Any amino acid
  VARIANT 59: note = Any amino acid
  VARIANT 60: note = Any amino acid
  VARIANT 61: note = Any amino acid
  VARIANT 62: note = Any amino acid
  VARIANT 63: note = Any amino acid
  VARIANT 64: note = Any amino acid
  VARIANT 65: note = Any amino acid
  VARIANT 66: note = Any amino acid
  VARIANT 67: note = Any amino acid
  VARIANT 68: note = Any amino acid
  VARIANT 69: note = Any amino acid
  VARIANT 70: note = Any amino acid
  VARIANT 71: note = Any amino acid
  VARIANT 72: note = Any amino acid
  VARIANT 73: note = Any amino acid
  VARIANT 74: note = Any amino acid
  VARIANT 75: note = Any amino acid
  VARIANT 76: note = Any amino acid
  VARIANT 77: note = Any amino acid
  VARIANT 78: note = Any amino acid
  VARIANT 79: note = Any amino acid
  VARIANT 80: note = Any amino acid
  VARIANT 81: note = Any amino acid
  VARIANT 82: note = Any amino acid
  VARIANT 83: note = Any amino acid
  VARIANT 84: note = Any amino acid
  VARIANT 85: note = Any amino acid
  VARIANT 86: note = Any amino acid
  VARIANT 87: note = Any amino acid
  VARIANT 88: note = Any amino acid
  VARIANT 89: note = Any amino acid
  VARIANT 90: note = Any amino acid
  VARIANT 91: note = Any amino acid
  VARIANT 92: note = Any amino acid
  VARIANT 93: note = Any amino acid
  VARIANT 94: note = Any amino acid
  VARIANT 95: note = Any amino acid
  VARIANT 97: note = Any amino acid
  VARIANT 99: note = Any amino acid
  VARIANT 100: note = Any amino acid
DXXXXXXXXXXXXXXXXXXXXXXXXXXXXXXXXXXXXXXXXXXXXXXXXXXXXXXEXXXXXXXXXXXXXXXXXXXXXXXXXXXXXXXXXXXXXXXKXDXXD

SEQ ID NO: 795596 - protein, 102 aa, unidentified
  VARIANT 2: note = Any amino acid
  VARIANT 3: note = Any amino acid
  VARIANT 4: note = Any amino acid
  VARIANT 5: note = Any amino acid
  VARIANT 6: note = Any amino acid
  VARIANT 7: note = Any amino acid
  VARIANT 8: note = Any amino acid
  VARIANT 9: note = Any amino acid
  VARIANT 10: note = Any amino acid
  VARIANT 11: note = Any amino acid
  VARIANT 12: note = Any amino acid
  VARIANT 13: note = Any amino acid
  VARIANT 14: note = Any amino acid
  VARIANT 15: note = Any amino acid
  VARIANT 16: note = Any amino acid
  VARIANT 17: note = Any amino acid
  VARIANT 18: note = Any amino acid
  VARIANT 19: note = Any amino acid
  VARIANT 20: note = Any amino acid
  VARIANT 21: note = Any amino acid
  VARIANT 22: note = Any amino acid
  VARIANT 23: note = Any amino acid
  VARIANT 24: note = Any amino acid
  VARIANT 25: note = Any amino acid
  VARIANT 26: note = Any amino acid
  VARIANT 27: note = Any amino acid
  VARIANT 28: note = Any amino acid
  VARIANT 29: note = Any amino acid
  VARIANT 30: note = Any amino acid
  VARIANT 31: note = Any amino acid
  VARIANT 32: note = Any amino acid
  VARIANT 33: note = Any amino acid
  VARIANT 34: note = Any amino acid
  VARIANT 35: note = Any amino acid
  VARIANT 36: note = Any amino acid
  VARIANT 37: note = Any amino acid
  VARIANT 38: note = Any amino acid
  VARIANT 39: note = Any amino acid
  VARIANT 40: note = Any amino acid
  VARIANT 41: note = Any amino acid
  VARIANT 42: note = Any amino acid
  VARIANT 43: note = Any amino acid
  VARIANT 44: note = Any amino acid
  VARIANT 45: note = Any amino acid
  VARIANT 46: note = Any amino acid
  VARIANT 47: note = Any amino acid
  VARIANT 48: note = Any amino acid
  VARIANT 49: note = Any amino acid
  VARIANT 50: note = Any amino acid
  VARIANT 51: note = Any amino acid
  VARIANT 52: note = Any amino acid
  VARIANT 53: note = Any amino acid
  VARIANT 54: note = Any amino acid
  VARIANT 55: note = Any amino acid
  VARIANT 56: note = Any amino acid
  VARIANT 58: note = Any amino acid
  VARIANT 59: note = Any amino acid
  VARIANT 60: note = Any amino acid
  VARIANT 61: note = Any amino acid
  VARIANT 62: note = Any amino acid
  VARIANT 63: note = Any amino acid
  VARIANT 64: note = Any amino acid
  VARIANT 65: note = Any amino acid
  VARIANT 66: note = Any amino acid
  VARIANT 67: note = Any amino acid
  VARIANT 68: note = Any amino acid
  VARIANT 69: note = Any amino acid
  VARIANT 70: note = Any amino acid
  VARIANT 71: note = Any amino acid
  VARIANT 72: note = Any amino acid
  VARIANT 73: note = Any amino acid
  VARIANT 74: note = Any amino acid
  VARIANT 75: note = Any amino acid
  VARIANT 76: note = Any amino acid
  VARIANT 77: note = Any amino acid
  VARIANT 78: note = Any amino acid
  VARIANT 79: note = Any amino acid
  VARIANT 80: note = Any amino acid
  VARIANT 81: note = Any amino acid
  VARIANT 82: note = Any amino acid
  VARIANT 83: note = Any amino acid
  VARIANT 84: note = Any amino acid
  VARIANT 85: note = Any amino acid
  VARIANT 86: note = Any amino acid
  VARIANT 87: note = Any amino acid
  VARIANT 88: note = Any amino acid
  VARIANT 89: note = Any amino acid
  VARIANT 90: note = Any amino acid
  VARIANT 91: note = Any amino acid
  VARIANT 92: note = Any amino acid
  VARIANT 93: note = Any amino acid
  VARIANT 94: note = Any amino acid
  VARIANT 95: note = Any amino acid
  VARIANT 96: note = Any amino acid
  VARIANT 98: note = Any amino acid
  VARIANT 100: note = Any amino acid
  VARIANT 101: note = Any amino acid
DXXXXXXXXXXXXXXXXXXXXXXXXXXXXXXXXXXXXXXXXXXXXXXXXXXXXXXXEXXXXXXXXXXXXXXXXXXXXXXXXXXXXXXXXXXXXXXXKXDXXD

SEQ ID NO: 795597 - protein, 93 aa, unidentified
  VARIANT 2: note = Any amino acid
  VARIANT 3: note = Any amino acid
  VARIANT 4: note = Any amino acid
  VARIANT 5: note = Any amino acid
  VARIANT 6: note = Any amino acid
  VARIANT 7: note = Any amino acid
  VARIANT 8: note = Any amino acid
  VARIANT 9: note = Any amino acid
  VARIANT 10: note = Any amino acid
  VARIANT 11: note = Any amino acid
  VARIANT 12: note = Any amino acid
  VARIANT 13: note = Any amino acid
  VARIANT 14: note = Any amino acid
  VARIANT 15: note = Any amino acid
  VARIANT 16: note = Any amino acid
  VARIANT 17: note = Any amino acid
  VARIANT 18: note = Any amino acid
  VARIANT 19: note = Any amino acid
  VARIANT 20: note = Any amino acid
  VARIANT 21: note = Any amino acid
  VARIANT 22: note = Any amino acid
  VARIANT 23: note = Any amino acid
  VARIANT 24: note = Any amino acid
  VARIANT 25: note = Any amino acid
  VARIANT 26: note = Any amino acid
  VARIANT 27: note = Any amino acid
  VARIANT 28: note = Any amino acid
  VARIANT 29: note = Any amino acid
  VARIANT 30: note = Any amino acid
  VARIANT 31: note = Any amino acid
  VARIANT 32: note = Any amino acid
  VARIANT 33: note = Any amino acid
  VARIANT 34: note = Any amino acid
  VARIANT 35: note = Any amino acid
  VARIANT 36: note = Any amino acid
  VARIANT 37: note = Any amino acid
  VARIANT 38: note = Any amino acid
  VARIANT 39: note = Any amino acid
  VARIANT 40: note = Any amino acid
  VARIANT 41: note = Any amino acid
  VARIANT 42: note = Any amino acid
  VARIANT 43: note = Any amino acid
  VARIANT 44: note = Any amino acid
  VARIANT 45: note = Any amino acid
  VARIANT 46: note = Any amino acid
  VARIANT 47: note = Any amino acid
  VARIANT 48: note = Any amino acid
  VARIANT 49: note = Any amino acid
  VARIANT 50: note = Any amino acid
  VARIANT 51: note = Any amino acid
  VARIANT 53: note = Any amino acid
  VARIANT 54: note = Any amino acid
  VARIANT 55: note = Any amino acid
  VARIANT 56: note = Any amino acid
  VARIANT 57: note = Any amino acid
  VARIANT 58: note = Any amino acid
  VARIANT 59: note = Any amino acid
  VARIANT 60: note = Any amino acid
  VARIANT 61: note = Any amino acid
  VARIANT 62: note = Any amino acid
  VARIANT 63: note = Any amino acid
  VARIANT 64: note = Any amino acid
  VARIANT 65: note = Any amino acid
  VARIANT 66: note = Any amino acid
  VARIANT 67: note = Any amino acid
  VARIANT 68: note = Any amino acid
  VARIANT 69: note = Any amino acid
  VARIANT 70: note = Any amino acid
  VARIANT 71: note = Any amino acid
  VARIANT 72: note = Any amino acid
  VARIANT 73: note = Any amino acid
  VARIANT 74: note = Any amino acid
  VARIANT 75: note = Any amino acid
  VARIANT 76: note = Any amino acid
  VARIANT 77: note = Any amino acid
  VARIANT 78: note = Any amino acid
  VARIANT 79: note = Any amino acid
  VARIANT 80: note = Any amino acid
  VARIANT 81: note = Any amino acid
  VARIANT 82: note = Any amino acid
  VARIANT 83: note = Any amino acid
  VARIANT 84: note = Any amino acid
  VARIANT 85: note = Any amino acid
  VARIANT 86: note = Any amino acid
  VARIANT 87: note = Any amino acid
  VARIANT 89: note = Any amino acid
  VARIANT 91: note = Any amino acid
  VARIANT 92: note = Any amino acid
DXXXXXXXXXXXXXXXXXXXXXXXXXXXXXXXXXXXXXXXXXXXXXXXXXXEXXXXXXXXXXXXXXXXXXXXXXXXXXXXXXXXXXXKXDXXD

SEQ ID NO: 795598 - protein, 91 aa, unidentified
  VARIANT 2: note = Any amino acid
  VARIANT 3: note = Any amino acid
  VARIANT 4: note = Any amino acid
  VARIANT 5: note = Any amino acid
  VARIANT 6: note = Any amino acid
  VARIANT 7: note = Any amino acid
  VARIANT 8: note = Any amino acid
  VARIANT 9: note = Any amino acid
  VARIANT 10: note = Any amino acid
  VARIANT 11: note = Any amino acid
  VARIANT 12: note = Any amino acid
  VARIANT 13: note = Any amino acid
  VARIANT 14: note = Any amino acid
  VARIANT 15: note = Any amino acid
  VARIANT 16: note = Any amino acid
  VARIANT 17: note = Any amino acid
  VARIANT 18: note = Any amino acid
  VARIANT 19: note = Any amino acid
  VARIANT 20: note = Any amino acid
  VARIANT 21: note = Any amino acid
  VARIANT 22: note = Any amino acid
  VARIANT 23: note = Any amino acid
  VARIANT 24: note = Any amino acid
  VARIANT 25: note = Any amino acid
  VARIANT 26: note = Any amino acid
  VARIANT 27: note = Any amino acid
  VARIANT 28: note = Any amino acid
  VARIANT 29: note = Any amino acid
  VARIANT 30: note = Any amino acid
  VARIANT 31: note = Any amino acid
  VARIANT 32: note = Any amino acid
  VARIANT 33: note = Any amino acid
  VARIANT 34: note = Any amino acid
  VARIANT 35: note = Any amino acid
  VARIANT 36: note = Any amino acid
  VARIANT 37: note = Any amino acid
  VARIANT 38: note = Any amino acid
  VARIANT 39: note = Any amino acid
  VARIANT 40: note = Any amino acid
  VARIANT 41: note = Any amino acid
  VARIANT 42: note = Any amino acid
  VARIANT 43: note = Any amino acid
  VARIANT 44: note = Any amino acid
  VARIANT 45: note = Any amino acid
  VARIANT 46: note = Any amino acid
  VARIANT 47: note = Any amino acid
  VARIANT 48: note = Any amino acid
  VARIANT 49: note = Any amino acid
  VARIANT 50: note = Any amino acid
  VARIANT 52: note = Any amino acid
  VARIANT 53: note = Any amino acid
  VARIANT 54: note = Any amino acid
  VARIANT 55: note = Any amino acid
  VARIANT 56: note = Any amino acid
  VARIANT 57: note = Any amino acid
  VARIANT 58: note = Any amino acid
  VARIANT 59: note = Any amino acid
  VARIANT 60: note = Any amino acid
  VARIANT 61: note = Any amino acid
  VARIANT 62: note = Any amino acid
  VARIANT 63: note = Any amino acid
  VARIANT 64: note = Any amino acid
  VARIANT 65: note = Any amino acid
  VARIANT 66: note = Any amino acid
  VARIANT 67: note = Any amino acid
  VARIANT 68: note = Any amino acid
  VARIANT 69: note = Any amino acid
  VARIANT 70: note = Any amino acid
  VARIANT 71: note = Any amino acid
  VARIANT 72: note = Any amino acid
  VARIANT 73: note = Any amino acid
  VARIANT 74: note = Any amino acid
  VARIANT 75: note = Any amino acid
  VARIANT 76: note = Any amino acid
  VARIANT 77: note = Any amino acid
  VARIANT 78: note = Any amino acid
  VARIANT 79: note = Any amino acid
  VARIANT 80: note = Any amino acid
  VARIANT 81: note = Any amino acid
  VARIANT 82: note = Any amino acid
  VARIANT 83: note = Any amino acid
  VARIANT 84: note = Any amino acid
  VARIANT 85: note = Any amino acid
  VARIANT 87: note = Any amino acid
  VARIANT 89: note = Any amino acid
  VARIANT 90: note = Any amino acid
DXXXXXXXXXXXXXXXXXXXXXXXXXXXXXXXXXXXXXXXXXXXXXXXXXEXXXXXXXXXXXXXXXXXXXXXXXXXXXXXXXXXXKXDXXD

SEQ ID NO: 795599 - protein, 93 aa, unidentified
  VARIANT 2: note = Any amino acid
  VARIANT 3: note = Any amino acid
  VARIANT 4: note = Any amino acid
  VARIANT 5: note = Any amino acid
  VARIANT 6: note = Any amino acid
  VARIANT 7: note = Any amino acid
  VARIANT 8: note = Any amino acid
  VARIANT 9: note = Any amino acid
  VARIANT 10: note = Any amino acid
  VARIANT 11: note = Any amino acid
  VARIANT 12: note = Any amino acid
  VARIANT 13: note = Any amino acid
  VARIANT 14: note = Any amino acid
  VARIANT 15: note = Any amino acid
  VARIANT 16: note = Any amino acid
  VARIANT 17: note = Any amino acid
  VARIANT 18: note = Any amino acid
  VARIANT 19: note = Any amino acid
  VARIANT 20: note = Any amino acid
  VARIANT 21: note = Any amino acid
  VARIANT 22: note = Any amino acid
  VARIANT 23: note = Any amino acid
  VARIANT 24: note = Any amino acid
  VARIANT 25: note = Any amino acid
  VARIANT 26: note = Any amino acid
  VARIANT 27: note = Any amino acid
  VARIANT 28: note = Any amino acid
  VARIANT 29: note = Any amino acid
  VARIANT 30: note = Any amino acid
  VARIANT 31: note = Any amino acid
  VARIANT 32: note = Any amino acid
  VARIANT 33: note = Any amino acid
  VARIANT 34: note = Any amino acid
  VARIANT 35: note = Any amino acid
  VARIANT 36: note = Any amino acid
  VARIANT 37: note = Any amino acid
  VARIANT 38: note = Any amino acid
  VARIANT 39: note = Any amino acid
  VARIANT 40: note = Any amino acid
  VARIANT 41: note = Any amino acid
  VARIANT 42: note = Any amino acid
  VARIANT 43: note = Any amino acid
  VARIANT 44: note = Any amino acid
  VARIANT 45: note = Any amino acid
  VARIANT 46: note = Any amino acid
  VARIANT 47: note = Any amino acid
  VARIANT 48: note = Any amino acid
  VARIANT 49: note = Any amino acid
  VARIANT 51: note = Any amino acid
  VARIANT 52: note = Any amino acid
  VARIANT 53: note = Any amino acid
  VARIANT 54: note = Any amino acid
  VARIANT 55: note = Any amino acid
  VARIANT 56: note = Any amino acid
  VARIANT 57: note = Any amino acid
  VARIANT 58: note = Any amino acid
  VARIANT 59: note = Any amino acid
  VARIANT 60: note = Any amino acid
  VARIANT 61: note = Any amino acid
  VARIANT 62: note = Any amino acid
  VARIANT 63: note = Any amino acid
  VARIANT 64: note = Any amino acid
  VARIANT 65: note = Any amino acid
  VARIANT 66: note = Any amino acid
  VARIANT 67: note = Any amino acid
  VARIANT 68: note = Any amino acid
  VARIANT 69: note = Any amino acid
  VARIANT 70: note = Any amino acid
  VARIANT 71: note = Any amino acid
  VARIANT 72: note = Any amino acid
  VARIANT 73: note = Any amino acid
  VARIANT 74: note = Any amino acid
  VARIANT 75: note = Any amino acid
  VARIANT 76: note = Any amino acid
  VARIANT 77: note = Any amino acid
  VARIANT 78: note = Any amino acid
  VARIANT 79: note = Any amino acid
  VARIANT 80: note = Any amino acid
  VARIANT 81: note = Any amino acid
  VARIANT 82: note = Any amino acid
  VARIANT 83: note = Any amino acid
  VARIANT 84: note = Any amino acid
  VARIANT 85: note = Any amino acid
  VARIANT 86: note = Any amino acid
  VARIANT 87: note = Any amino acid
  VARIANT 89: note = Any amino acid
  VARIANT 91: note = Any amino acid
  VARIANT 92: note = Any amino acid
DXXXXXXXXXXXXXXXXXXXXXXXXXXXXXXXXXXXXXXXXXXXXXXXXEXXXXXXXXXXXXXXXXXXXXXXXXXXXXXXXXXXXXXKXDXXD

SEQ ID NO: 795600 - protein, 87 aa, unidentified
  VARIANT 2: note = Any amino acid
  VARIANT 3: note = Any amino acid
  VARIANT 4: note = Any amino acid
  VARIANT 5: note = Any amino acid
  VARIANT 6: note = Any amino acid
  VARIANT 7: note = Any amino acid
  VARIANT 8: note = Any amino acid
  VARIANT 9: note = Any amino acid
  VARIANT 10: note = Any amino acid
  VARIANT 11: note = Any amino acid
  VARIANT 12: note = Any amino acid
  VARIANT 13: note = Any amino acid
  VARIANT 14: note = Any amino acid
  VARIANT 15: note = Any amino acid
  VARIANT 16: note = Any amino acid
  VARIANT 17: note = Any amino acid
  VARIANT 18: note = Any amino acid
  VARIANT 19: note = Any amino acid
  VARIANT 20: note = Any amino acid
  VARIANT 21: note = Any amino acid
  VARIANT 22: note = Any amino acid
  VARIANT 23: note = Any amino acid
  VARIANT 24: note = Any amino acid
  VARIANT 25: note = Any amino acid
  VARIANT 26: note = Any amino acid
  VARIANT 27: note = Any amino acid
  VARIANT 28: note = Any amino acid
  VARIANT 29: note = Any amino acid
  VARIANT 30: note = Any amino acid
  VARIANT 31: note = Any amino acid
  VARIANT 32: note = Any amino acid
  VARIANT 33: note = Any amino acid
  VARIANT 34: note = Any amino acid
  VARIANT 35: note = Any amino acid
  VARIANT 36: note = Any amino acid
  VARIANT 37: note = Any amino acid
  VARIANT 38: note = Any amino acid
  VARIANT 39: note = Any amino acid
  VARIANT 40: note = Any amino acid
  VARIANT 41: note = Any amino acid
  VARIANT 42: note = Any amino acid
  VARIANT 43: note = Any amino acid
  VARIANT 44: note = Any amino acid
  VARIANT 45: note = Any amino acid
  VARIANT 46: note = Any amino acid
  VARIANT 47: note = Any amino acid
  VARIANT 49: note = Any amino acid
  VARIANT 50: note = Any amino acid
  VARIANT 51: note = Any amino acid
  VARIANT 52: note = Any amino acid
  VARIANT 53: note = Any amino acid
  VARIANT 54: note = Any amino acid
  VARIANT 55: note = Any amino acid
  VARIANT 56: note = Any amino acid
  VARIANT 57: note = Any amino acid
  VARIANT 58: note = Any amino acid
  VARIANT 59: note = Any amino acid
  VARIANT 60: note = Any amino acid
  VARIANT 61: note = Any amino acid
  VARIANT 62: note = Any amino acid
  VARIANT 63: note = Any amino acid
  VARIANT 64: note = Any amino acid
  VARIANT 65: note = Any amino acid
  VARIANT 66: note = Any amino acid
  VARIANT 67: note = Any amino acid
  VARIANT 68: note = Any amino acid
  VARIANT 69: note = Any amino acid
  VARIANT 70: note = Any amino acid
  VARIANT 71: note = Any amino acid
  VARIANT 72: note = Any amino acid
  VARIANT 73: note = Any amino acid
  VARIANT 74: note = Any amino acid
  VARIANT 75: note = Any amino acid
  VARIANT 76: note = Any amino acid
  VARIANT 77: note = Any amino acid
  VARIANT 78: note = Any amino acid
  VARIANT 79: note = Any amino acid
  VARIANT 80: note = Any amino acid
  VARIANT 81: note = Any amino acid
  VARIANT 83: note = Any amino acid
  VARIANT 85: note = Any amino acid
  VARIANT 86: note = Any amino acid
DXXXXXXXXXXXXXXXXXXXXXXXXXXXXXXXXXXXXXXXXXXXXXXEXXXXXXXXXXXXXXXXXXXXXXXXXXXXXXXXXKXDXXD

SEQ ID NO: 795601 - protein, 92 aa, unidentified
  VARIANT 2: note = Any amino acid
  VARIANT 3: note = Any amino acid
  VARIANT 4: note = Any amino acid
  VARIANT 5: note = Any amino acid
  VARIANT 6: note = Any amino acid
  VARIANT 7: note = Any amino acid
  VARIANT 8: note = Any amino acid
  VARIANT 9: note = Any amino acid
  VARIANT 10: note = Any amino acid
  VARIANT 11: note = Any amino acid
  VARIANT 12: note = Any amino acid
  VARIANT 13: note = Any amino acid
  VARIANT 14: note = Any amino acid
  VARIANT 15: note = Any amino acid
  VARIANT 16: note = Any amino acid
  VARIANT 17: note = Any amino acid
  VARIANT 18: note = Any amino acid
  VARIANT 19: note = Any amino acid
  VARIANT 20: note = Any amino acid
  VARIANT 21: note = Any amino acid
  VARIANT 22: note = Any amino acid
  VARIANT 23: note = Any amino acid
  VARIANT 24: note = Any amino acid
  VARIANT 25: note = Any amino acid
  VARIANT 26: note = Any amino acid
  VARIANT 27: note = Any amino acid
  VARIANT 28: note = Any amino acid
  VARIANT 29: note = Any amino acid
  VARIANT 30: note = Any amino acid
  VARIANT 31: note = Any amino acid
  VARIANT 32: note = Any amino acid
  VARIANT 33: note = Any amino acid
  VARIANT 34: note = Any amino acid
  VARIANT 35: note = Any amino acid
  VARIANT 36: note = Any amino acid
  VARIANT 37: note = Any amino acid
  VARIANT 38: note = Any amino acid
  VARIANT 39: note = Any amino acid
  VARIANT 40: note = Any amino acid
  VARIANT 41: note = Any amino acid
  VARIANT 42: note = Any amino acid
  VARIANT 43: note = Any amino acid
  VARIANT 44: note = Any amino acid
  VARIANT 45: note = Any amino acid
  VARIANT 46: note = Any amino acid
  VARIANT 48: note = Any amino acid
  VARIANT 49: note = Any amino acid
  VARIANT 50: note = Any amino acid
  VARIANT 51: note = Any amino acid
  VARIANT 52: note = Any amino acid
  VARIANT 53: note = Any amino acid
  VARIANT 54: note = Any amino acid
  VARIANT 55: note = Any amino acid
  VARIANT 56: note = Any amino acid
  VARIANT 57: note = Any amino acid
  VARIANT 58: note = Any amino acid
  VARIANT 59: note = Any amino acid
  VARIANT 60: note = Any amino acid
  VARIANT 61: note = Any amino acid
  VARIANT 62: note = Any amino acid
  VARIANT 63: note = Any amino acid
  VARIANT 64: note = Any amino acid
  VARIANT 65: note = Any amino acid
  VARIANT 66: note = Any amino acid
  VARIANT 67: note = Any amino acid
  VARIANT 68: note = Any amino acid
  VARIANT 69: note = Any amino acid
  VARIANT 70: note = Any amino acid
  VARIANT 71: note = Any amino acid
  VARIANT 72: note = Any amino acid
  VARIANT 73: note = Any amino acid
  VARIANT 74: note = Any amino acid
  VARIANT 75: note = Any amino acid
  VARIANT 76: note = Any amino acid
  VARIANT 77: note = Any amino acid
  VARIANT 78: note = Any amino acid
  VARIANT 79: note = Any amino acid
  VARIANT 80: note = Any amino acid
  VARIANT 81: note = Any amino acid
  VARIANT 82: note = Any amino acid
  VARIANT 83: note = Any amino acid
  VARIANT 84: note = Any amino acid
  VARIANT 85: note = Any amino acid
  VARIANT 86: note = Any amino acid
  VARIANT 88: note = Any amino acid
  VARIANT 90: note = Any amino acid
  VARIANT 91: note = Any amino acid
DXXXXXXXXXXXXXXXXXXXXXXXXXXXXXXXXXXXXXXXXXXXXXEXXXXXXXXXXXXXXXXXXXXXXXXXXXXXXXXXXXXXXXKXDXXD

SEQ ID NO: 795602 - protein, 87 aa, unidentified
  VARIANT 2: note = Any amino acid
  VARIANT 3: note = Any amino acid
  VARIANT 4: note = Any amino acid
  VARIANT 5: note = Any amino acid
  VARIANT 6: note = Any amino acid
  VARIANT 7: note = Any amino acid
  VARIANT 8: note = Any amino acid
  VARIANT 9: note = Any amino acid
  VARIANT 10: note = Any amino acid
  VARIANT 11: note = Any amino acid
  VARIANT 12: note = Any amino acid
  VARIANT 13: note = Any amino acid
  VARIANT 14: note = Any amino acid
  VARIANT 15: note = Any amino acid
  VARIANT 16: note = Any amino acid
  VARIANT 17: note = Any amino acid
  VARIANT 18: note = Any amino acid
  VARIANT 19: note = Any amino acid
  VARIANT 20: note = Any amino acid
  VARIANT 21: note = Any amino acid
  VARIANT 22: note = Any amino acid
  VARIANT 23: note = Any amino acid
  VARIANT 24: note = Any amino acid
  VARIANT 25: note = Any amino acid
  VARIANT 26: note = Any amino acid
  VARIANT 27: note = Any amino acid
  VARIANT 28: note = Any amino acid
  VARIANT 29: note = Any amino acid
  VARIANT 30: note = Any amino acid
  VARIANT 31: note = Any amino acid
  VARIANT 32: note = Any amino acid
  VARIANT 33: note = Any amino acid
  VARIANT 34: note = Any amino acid
  VARIANT 35: note = Any amino acid
  VARIANT 36: note = Any amino acid
  VARIANT 37: note = Any amino acid
  VARIANT 38: note = Any amino acid
  VARIANT 39: note = Any amino acid
  VARIANT 40: note = Any amino acid
  VARIANT 41: note = Any amino acid
  VARIANT 42: note = Any amino acid
  VARIANT 43: note = Any amino acid
  VARIANT 44: note = Any amino acid
  VARIANT 45: note = Any amino acid
  VARIANT 46: note = Any amino acid
  VARIANT 48: note = Any amino acid
  VARIANT 49: note = Any amino acid
  VARIANT 50: note = Any amino acid
  VARIANT 51: note = Any amino acid
  VARIANT 52: note = Any amino acid
  VARIANT 53: note = Any amino acid
  VARIANT 54: note = Any amino acid
  VARIANT 55: note = Any amino acid
  VARIANT 56: note = Any amino acid
  VARIANT 57: note = Any amino acid
  VARIANT 58: note = Any amino acid
  VARIANT 59: note = Any amino acid
  VARIANT 60: note = Any amino acid
  VARIANT 61: note = Any amino acid
  VARIANT 62: note = Any amino acid
  VARIANT 63: note = Any amino acid
  VARIANT 64: note = Any amino acid
  VARIANT 65: note = Any amino acid
  VARIANT 66: note = Any amino acid
  VARIANT 67: note = Any amino acid
  VARIANT 68: note = Any amino acid
  VARIANT 69: note = Any amino acid
  VARIANT 70: note = Any amino acid
  VARIANT 71: note = Any amino acid
  VARIANT 72: note = Any amino acid
  VARIANT 73: note = Any amino acid
  VARIANT 74: note = Any amino acid
  VARIANT 75: note = Any amino acid
  VARIANT 76: note = Any amino acid
  VARIANT 77: note = Any amino acid
  VARIANT 78: note = Any amino acid
  VARIANT 79: note = Any amino acid
  VARIANT 80: note = Any amino acid
  VARIANT 81: note = Any amino acid
  VARIANT 83: note = Any amino acid
  VARIANT 85: note = Any amino acid
  VARIANT 86: note = Any amino acid
DXXXXXXXXXXXXXXXXXXXXXXXXXXXXXXXXXXXXXXXXXXXXXEXXXXXXXXXXXXXXXXXXXXXXXXXXXXXXXXXXKXDXXD

SEQ ID NO: 795603 - protein, 95 aa, unidentified
  VARIANT 2: note = Any amino acid
  VARIANT 3: note = Any amino acid
  VARIANT 4: note = Any amino acid
  VARIANT 5: note = Any amino acid
  VARIANT 6: note = Any amino acid
  VARIANT 7: note = Any amino acid
  VARIANT 8: note = Any amino acid
  VARIANT 9: note = Any amino acid
  VARIANT 10: note = Any amino acid
  VARIANT 11: note = Any amino acid
  VARIANT 12: note = Any amino acid
  VARIANT 13: note = Any amino acid
  VARIANT 14: note = Any amino acid
  VARIANT 15: note = Any amino acid
  VARIANT 16: note = Any amino acid
  VARIANT 17: note = Any amino acid
  VARIANT 18: note = Any amino acid
  VARIANT 19: note = Any amino acid
  VARIANT 20: note = Any amino acid
  VARIANT 21: note = Any amino acid
  VARIANT 22: note = Any amino acid
  VARIANT 23: note = Any amino acid
  VARIANT 24: note = Any amino acid
  VARIANT 25: note = Any amino acid
  VARIANT 26: note = Any amino acid
  VARIANT 27: note = Any amino acid
  VARIANT 28: note = Any amino acid
  VARIANT 29: note = Any amino acid
  VARIANT 30: note = Any amino acid
  VARIANT 31: note = Any amino acid
  VARIANT 32: note = Any amino acid
  VARIANT 33: note = Any amino acid
  VARIANT 34: note = Any amino acid
  VARIANT 35: note = Any amino acid
  VARIANT 36: note = Any amino acid
  VARIANT 37: note = Any amino acid
  VARIANT 38: note = Any amino acid
  VARIANT 39: note = Any amino acid
  VARIANT 40: note = Any amino acid
  VARIANT 41: note = Any amino acid
  VARIANT 42: note = Any amino acid
  VARIANT 43: note = Any amino acid
  VARIANT 44: note = Any amino acid
  VARIANT 45: note = Any amino acid
  VARIANT 46: note = Any amino acid
  VARIANT 47: note = Any amino acid
  VARIANT 48: note = Any amino acid
  VARIANT 49: note = Any amino acid
  VARIANT 51: note = Any amino acid
  VARIANT 52: note = Any amino acid
  VARIANT 53: note = Any amino acid
  VARIANT 54: note = Any amino acid
  VARIANT 55: note = Any amino acid
  VARIANT 56: note = Any amino acid
  VARIANT 57: note = Any amino acid
  VARIANT 58: note = Any amino acid
  VARIANT 59: note = Any amino acid
  VARIANT 60: note = Any amino acid
  VARIANT 61: note = Any amino acid
  VARIANT 62: note = Any amino acid
  VARIANT 63: note = Any amino acid
  VARIANT 64: note = Any amino acid
  VARIANT 65: note = Any amino acid
  VARIANT 66: note = Any amino acid
  VARIANT 67: note = Any amino acid
  VARIANT 68: note = Any amino acid
  VARIANT 69: note = Any amino acid
  VARIANT 70: note = Any amino acid
  VARIANT 71: note = Any amino acid
  VARIANT 72: note = Any amino acid
  VARIANT 73: note = Any amino acid
  VARIANT 74: note = Any amino acid
  VARIANT 75: note = Any amino acid
  VARIANT 76: note = Any amino acid
  VARIANT 77: note = Any amino acid
  VARIANT 78: note = Any amino acid
  VARIANT 79: note = Any amino acid
  VARIANT 80: note = Any amino acid
  VARIANT 81: note = Any amino acid
  VARIANT 82: note = Any amino acid
  VARIANT 83: note = Any amino acid
  VARIANT 84: note = Any amino acid
  VARIANT 85: note = Any amino acid
  VARIANT 86: note = Any amino acid
  VARIANT 87: note = Any amino acid
  VARIANT 88: note = Any amino acid
  VARIANT 89: note = Any amino acid
  VARIANT 91: note = Any amino acid
  VARIANT 93: note = Any amino acid
  VARIANT 94: note = Any amino acid
DXXXXXXXXXXXXXXXXXXXXXXXXXXXXXXXXXXXXXXXXXXXXXXXXAXXXXXXXXXXXXXXXXXXXXXXXXXXXXXXXXXXXXXXXKXDXXD

SEQ ID NO: 795604 - protein, 96 aa, unidentified
  VARIANT 2: note = Any amino acid
  VARIANT 3: note = Any amino acid
  VARIANT 4: note = Any amino acid
  VARIANT 5: note = Any amino acid
  VARIANT 6: note = Any amino acid
  VARIANT 7: note = Any amino acid
  VARIANT 8: note = Any amino acid
  VARIANT 9: note = Any amino acid
  VARIANT 10: note = Any amino acid
  VARIANT 11: note = Any amino acid
  VARIANT 12: note = Any amino acid
  VARIANT 13: note = Any amino acid
  VARIANT 14: note = Any amino acid
  VARIANT 15: note = Any amino acid
  VARIANT 16: note = Any amino acid
  VARIANT 17: note = Any amino acid
  VARIANT 18: note = Any amino acid
  VARIANT 19: note = Any amino acid
  VARIANT 20: note = Any amino acid
  VARIANT 21: note = Any amino acid
  VARIANT 22: note = Any amino acid
  VARIANT 23: note = Any amino acid
  VARIANT 24: note = Any amino acid
  VARIANT 25: note = Any amino acid
  VARIANT 26: note = Any amino acid
  VARIANT 27: note = Any amino acid
  VARIANT 28: note = Any amino acid
  VARIANT 29: note = Any amino acid
  VARIANT 30: note = Any amino acid
  VARIANT 31: note = Any amino acid
  VARIANT 32: note = Any amino acid
  VARIANT 33: note = Any amino acid
  VARIANT 34: note = Any amino acid
  VARIANT 35: note = Any amino acid
  VARIANT 36: note = Any amino acid
  VARIANT 37: note = Any amino acid
  VARIANT 38: note = Any amino acid
  VARIANT 39: note = Any amino acid
  VARIANT 40: note = Any amino acid
  VARIANT 41: note = Any amino acid
  VARIANT 42: note = Any amino acid
  VARIANT 43: note = Any amino acid
  VARIANT 44: note = Any amino acid
  VARIANT 45: note = Any amino acid
  VARIANT 46: note = Any amino acid
  VARIANT 47: note = Any amino acid
  VARIANT 48: note = Any amino acid
  VARIANT 49: note = Any amino acid
  VARIANT 51: note = Any amino acid
  VARIANT 52: note = Any amino acid
  VARIANT 53: note = Any amino acid
  VARIANT 54: note = Any amino acid
  VARIANT 55: note = Any amino acid
  VARIANT 56: note = Any amino acid
  VARIANT 57: note = Any amino acid
  VARIANT 58: note = Any amino acid
  VARIANT 59: note = Any amino acid
  VARIANT 60: note = Any amino acid
  VARIANT 61: note = Any amino acid
  VARIANT 62: note = Any amino acid
  VARIANT 63: note = Any amino acid
  VARIANT 64: note = Any amino acid
  VARIANT 65: note = Any amino acid
  VARIANT 66: note = Any amino acid
  VARIANT 67: note = Any amino acid
  VARIANT 68: note = Any amino acid
  VARIANT 69: note = Any amino acid
  VARIANT 70: note = Any amino acid
  VARIANT 71: note = Any amino acid
  VARIANT 72: note = Any amino acid
  VARIANT 73: note = Any amino acid
  VARIANT 74: note = Any amino acid
  VARIANT 75: note = Any amino acid
  VARIANT 76: note = Any amino acid
  VARIANT 77: note = Any amino acid
  VARIANT 78: note = Any amino acid
  VARIANT 79: note = Any amino acid
  VARIANT 80: note = Any amino acid
  VARIANT 81: note = Any amino acid
  VARIANT 82: note = Any amino acid
  VARIANT 83: note = Any amino acid
  VARIANT 84: note = Any amino acid
  VARIANT 85: note = Any amino acid
  VARIANT 86: note = Any amino acid
  VARIANT 87: note = Any amino acid
  VARIANT 88: note = Any amino acid
  VARIANT 89: note = Any amino acid
  VARIANT 90: note = Any amino acid
  VARIANT 92: note = Any amino acid
  VARIANT 94: note = Any amino acid
  VARIANT 95: note = Any amino acid
DXXXXXXXXXXXXXXXXXXXXXXXXXXXXXXXXXXXXXXXXXXXXXXXXEXXXXXXXXXXXXXXXXXXXXXXXXXXXXXXXXXXXXXXXXKXDXXD

SEQ ID NO: 795605 - protein, 92 aa, unidentified
  VARIANT 2: note = Any amino acid
  VARIANT 3: note = Any amino acid
  VARIANT 4: note = Any amino acid
  VARIANT 5: note = Any amino acid
  VARIANT 6: note = Any amino acid
  VARIANT 7: note = Any amino acid
  VARIANT 8: note = Any amino acid
  VARIANT 9: note = Any amino acid
  VARIANT 10: note = Any amino acid
  VARIANT 11: note = Any amino acid
  VARIANT 12: note = Any amino acid
  VARIANT 13: note = Any amino acid
  VARIANT 14: note = Any amino acid
  VARIANT 15: note = Any amino acid
  VARIANT 16: note = Any amino acid
  VARIANT 17: note = Any amino acid
  VARIANT 18: note = Any amino acid
  VARIANT 19: note = Any amino acid
  VARIANT 20: note = Any amino acid
  VARIANT 21: note = Any amino acid
  VARIANT 22: note = Any amino acid
  VARIANT 23: note = Any amino acid
  VARIANT 24: note = Any amino acid
  VARIANT 25: note = Any amino acid
  VARIANT 26: note = Any amino acid
  VARIANT 27: note = Any amino acid
  VARIANT 28: note = Any amino acid
  VARIANT 29: note = Any amino acid
  VARIANT 30: note = Any amino acid
  VARIANT 31: note = Any amino acid
  VARIANT 32: note = Any amino acid
  VARIANT 33: note = Any amino acid
  VARIANT 34: note = Any amino acid
  VARIANT 35: note = Any amino acid
  VARIANT 36: note = Any amino acid
  VARIANT 37: note = Any amino acid
  VARIANT 38: note = Any amino acid
  VARIANT 39: note = Any amino acid
  VARIANT 40: note = Any amino acid
  VARIANT 41: note = Any amino acid
  VARIANT 42: note = Any amino acid
  VARIANT 43: note = Any amino acid
  VARIANT 44: note = Any amino acid
  VARIANT 45: note = Any amino acid
  VARIANT 46: note = Any amino acid
  VARIANT 47: note = Any amino acid
  VARIANT 48: note = Any amino acid
  VARIANT 49: note = Any amino acid
  VARIANT 50: note = Any amino acid
  VARIANT 52: note = Any amino acid
  VARIANT 53: note = Any amino acid
  VARIANT 54: note = Any amino acid
  VARIANT 55: note = Any amino acid
  VARIANT 56: note = Any amino acid
  VARIANT 57: note = Any amino acid
  VARIANT 58: note = Any amino acid
  VARIANT 59: note = Any amino acid
  VARIANT 60: note = Any amino acid
  VARIANT 61: note = Any amino acid
  VARIANT 62: note = Any amino acid
  VARIANT 63: note = Any amino acid
  VARIANT 64: note = Any amino acid
  VARIANT 65: note = Any amino acid
  VARIANT 66: note = Any amino acid
  VARIANT 67: note = Any amino acid
  VARIANT 68: note = Any amino acid
  VARIANT 69: note = Any amino acid
  VARIANT 70: note = Any amino acid
  VARIANT 71: note = Any amino acid
  VARIANT 72: note = Any amino acid
  VARIANT 73: note = Any amino acid
  VARIANT 74: note = Any amino acid
  VARIANT 75: note = Any amino acid
  VARIANT 76: note = Any amino acid
  VARIANT 77: note = Any amino acid
  VARIANT 78: note = Any amino acid
  VARIANT 79: note = Any amino acid
  VARIANT 80: note = Any amino acid
  VARIANT 81: note = Any amino acid
  VARIANT 82: note = Any amino acid
  VARIANT 83: note = Any amino acid
  VARIANT 84: note = Any amino acid
  VARIANT 85: note = Any amino acid
  VARIANT 86: note = Any amino acid
  VARIANT 88: note = Any amino acid
  VARIANT 90: note = Any amino acid
  VARIANT 91: note = Any amino acid
DXXXXXXXXXXXXXXXXXXXXXXXXXXXXXXXXXXXXXXXXXXXXXXXXXEXXXXXXXXXXXXXXXXXXXXXXXXXXXXXXXXXXXKXDXXD

SEQ ID NO: 795606 - protein, 95 aa, unidentified
  VARIANT 2: note = Any amino acid
  VARIANT 3: note = Any amino acid
  VARIANT 4: note = Any amino acid
  VARIANT 5: note = Any amino acid
  VARIANT 6: note = Any amino acid
  VARIANT 7: note = Any amino acid
  VARIANT 8: note = Any amino acid
  VARIANT 9: note = Any amino acid
  VARIANT 10: note = Any amino acid
  VARIANT 11: note = Any amino acid
  VARIANT 12: note = Any amino acid
  VARIANT 13: note = Any amino acid
  VARIANT 14: note = Any amino acid
  VARIANT 15: note = Any amino acid
  VARIANT 16: note = Any amino acid
  VARIANT 17: note = Any amino acid
  VARIANT 18: note = Any amino acid
  VARIANT 19: note = Any amino acid
  VARIANT 20: note = Any amino acid
  VARIANT 21: note = Any amino acid
  VARIANT 22: note = Any amino acid
  VARIANT 23: note = Any amino acid
  VARIANT 24: note = Any amino acid
  VARIANT 25: note = Any amino acid
  VARIANT 26: note = Any amino acid
  VARIANT 27: note = Any amino acid
  VARIANT 28: note = Any amino acid
  VARIANT 29: note = Any amino acid
  VARIANT 30: note = Any amino acid
  VARIANT 31: note = Any amino acid
  VARIANT 32: note = Any amino acid
  VARIANT 33: note = Any amino acid
  VARIANT 34: note = Any amino acid
  VARIANT 35: note = Any amino acid
  VARIANT 36: note = Any amino acid
  VARIANT 37: note = Any amino acid
  VARIANT 38: note = Any amino acid
  VARIANT 39: note = Any amino acid
  VARIANT 40: note = Any amino acid
  VARIANT 41: note = Any amino acid
  VARIANT 42: note = Any amino acid
  VARIANT 43: note = Any amino acid
  VARIANT 44: note = Any amino acid
  VARIANT 45: note = Any amino acid
  VARIANT 46: note = Any amino acid
  VARIANT 47: note = Any amino acid
  VARIANT 48: note = Any amino acid
  VARIANT 49: note = Any amino acid
  VARIANT 51: note = Any amino acid
  VARIANT 52: note = Any amino acid
  VARIANT 53: note = Any amino acid
  VARIANT 54: note = Any amino acid
  VARIANT 55: note = Any amino acid
  VARIANT 56: note = Any amino acid
  VARIANT 57: note = Any amino acid
  VARIANT 58: note = Any amino acid
  VARIANT 59: note = Any amino acid
  VARIANT 60: note = Any amino acid
  VARIANT 61: note = Any amino acid
  VARIANT 62: note = Any amino acid
  VARIANT 63: note = Any amino acid
  VARIANT 64: note = Any amino acid
  VARIANT 65: note = Any amino acid
  VARIANT 66: note = Any amino acid
  VARIANT 67: note = Any amino acid
  VARIANT 68: note = Any amino acid
  VARIANT 69: note = Any amino acid
  VARIANT 70: note = Any amino acid
  VARIANT 71: note = Any amino acid
  VARIANT 72: note = Any amino acid
  VARIANT 73: note = Any amino acid
  VARIANT 74: note = Any amino acid
  VARIANT 75: note = Any amino acid
  VARIANT 76: note = Any amino acid
  VARIANT 77: note = Any amino acid
  VARIANT 78: note = Any amino acid
  VARIANT 79: note = Any amino acid
  VARIANT 80: note = Any amino acid
  VARIANT 81: note = Any amino acid
  VARIANT 82: note = Any amino acid
  VARIANT 83: note = Any amino acid
  VARIANT 84: note = Any amino acid
  VARIANT 85: note = Any amino acid
  VARIANT 86: note = Any amino acid
  VARIANT 87: note = Any amino acid
  VARIANT 88: note = Any amino acid
  VARIANT 89: note = Any amino acid
  VARIANT 91: note = Any amino acid
  VARIANT 93: note = Any amino acid
  VARIANT 94: note = Any amino acid
DXXXXXXXXXXXXXXXXXXXXXXXXXXXXXXXXXXXXXXXXXXXXXXXXDXXXXXXXXXXXXXXXXXXXXXXXXXXXXXXXXXXXXXXXKXDXXD

SEQ ID NO: 795607 - protein, 106 aa, unidentified
  VARIANT 2: note = Any amino acid
  VARIANT 3: note = Any amino acid
  VARIANT 4: note = Any amino acid
  VARIANT 5: note = Any amino acid
  VARIANT 6: note = Any amino acid
  VARIANT 7: note = Any amino acid
  VARIANT 8: note = Any amino acid
  VARIANT 9: note = Any amino acid
  VARIANT 10: note = Any amino acid
  VARIANT 11: note = Any amino acid
  VARIANT 12: note = Any amino acid
  VARIANT 13: note = Any amino acid
  VARIANT 14: note = Any amino acid
  VARIANT 15: note = Any amino acid
  VARIANT 16: note = Any amino acid
  VARIANT 17: note = Any amino acid
  VARIANT 18: note = Any amino acid
  VARIANT 19: note = Any amino acid
  VARIANT 20: note = Any amino acid
  VARIANT 21: note = Any amino acid
  VARIANT 22: note = Any amino acid
  VARIANT 23: note = Any amino acid
  VARIANT 24: note = Any amino acid
  VARIANT 25: note = Any amino acid
  VARIANT 26: note = Any amino acid
  VARIANT 27: note = Any amino acid
  VARIANT 28: note = Any amino acid
  VARIANT 29: note = Any amino acid
  VARIANT 30: note = Any amino acid
  VARIANT 31: note = Any amino acid
  VARIANT 32: note = Any amino acid
  VARIANT 33: note = Any amino acid
  VARIANT 34: note = Any amino acid
  VARIANT 35: note = Any amino acid
  VARIANT 36: note = Any amino acid
  VARIANT 37: note = Any amino acid
  VARIANT 38: note = Any amino acid
  VARIANT 39: note = Any amino acid
  VARIANT 40: note = Any amino acid
  VARIANT 41: note = Any amino acid
  VARIANT 42: note = Any amino acid
  VARIANT 43: note = Any amino acid
  VARIANT 44: note = Any amino acid
  VARIANT 45: note = Any amino acid
  VARIANT 46: note = Any amino acid
  VARIANT 47: note = Any amino acid
  VARIANT 48: note = Any amino acid
  VARIANT 49: note = Any amino acid
  VARIANT 50: note = Any amino acid
  VARIANT 51: note = Any amino acid
  VARIANT 52: note = Any amino acid
  VARIANT 53: note = Any amino acid
  VARIANT 54: note = Any amino acid
  VARIANT 56: note = Any amino acid
  VARIANT 57: note = Any amino acid
  VARIANT 58: note = Any amino acid
  VARIANT 59: note = Any amino acid
  VARIANT 60: note = Any amino acid
  VARIANT 61: note = Any amino acid
  VARIANT 62: note = Any amino acid
  VARIANT 63: note = Any amino acid
  VARIANT 64: note = Any amino acid
  VARIANT 65: note = Any amino acid
  VARIANT 66: note = Any amino acid
  VARIANT 67: note = Any amino acid
  VARIANT 68: note = Any amino acid
  VARIANT 69: note = Any amino acid
  VARIANT 70: note = Any amino acid
  VARIANT 71: note = Any amino acid
  VARIANT 72: note = Any amino acid
  VARIANT 73: note = Any amino acid
  VARIANT 74: note = Any amino acid
  VARIANT 75: note = Any amino acid
  VARIANT 76: note = Any amino acid
  VARIANT 77: note = Any amino acid
  VARIANT 78: note = Any amino acid
  VARIANT 79: note = Any amino acid
  VARIANT 80: note = Any amino acid
  VARIANT 81: note = Any amino acid
  VARIANT 82: note = Any amino acid
  VARIANT 83: note = Any amino acid
  VARIANT 84: note = Any amino acid
  VARIANT 85: note = Any amino acid
  VARIANT 86: note = Any amino acid
  VARIANT 87: note = Any amino acid
  VARIANT 88: note = Any amino acid
  VARIANT 89: note = Any amino acid
  VARIANT 90: note = Any amino acid
  VARIANT 91: note = Any amino acid
  VARIANT 92: note = Any amino acid
  VARIANT 93: note = Any amino acid
  VARIANT 94: note = Any amino acid
  VARIANT 95: note = Any amino acid
  VARIANT 96: note = Any amino acid
  VARIANT 97: note = Any amino acid
  VARIANT 98: note = Any amino acid
  VARIANT 99: note = Any amino acid
  VARIANT 100: note = Any amino acid
  VARIANT 102: note = Any amino acid
  VARIANT 104: note = Any amino acid
  VARIANT 105: note = Any amino acid
DXXXXXXXXXXXXXXXXXXXXXXXXXXXXXXXXXXXXXXXXXXXXXXXXXXXXXEXXXXXXXXXXXXXXXXXXXXXXXXXXXXXXXXXXXXXXXXXXXXXKXDXXD

SEQ ID NO: 795608 - protein, 103 aa, unidentified
  VARIANT 2: note = Any amino acid
  VARIANT 3: note = Any amino acid
  VARIANT 4: note = Any amino acid
  VARIANT 5: note = Any amino acid
  VARIANT 6: note = Any amino acid
  VARIANT 7: note = Any amino acid
  VARIANT 8: note = Any amino acid
  VARIANT 9: note = Any amino acid
  VARIANT 10: note = Any amino acid
  VARIANT 11: note = Any amino acid
  VARIANT 12: note = Any amino acid
  VARIANT 13: note = Any amino acid
  VARIANT 14: note = Any amino acid
  VARIANT 15: note = Any amino acid
  VARIANT 16: note = Any amino acid
  VARIANT 17: note = Any amino acid
  VARIANT 18: note = Any amino acid
  VARIANT 19: note = Any amino acid
  VARIANT 20: note = Any amino acid
  VARIANT 21: note = Any amino acid
  VARIANT 22: note = Any amino acid
  VARIANT 23: note = Any amino acid
  VARIANT 24: note = Any amino acid
  VARIANT 25: note = Any amino acid
  VARIANT 26: note = Any amino acid
  VARIANT 27: note = Any amino acid
  VARIANT 28: note = Any amino acid
  VARIANT 29: note = Any amino acid
  VARIANT 30: note = Any amino acid
  VARIANT 31: note = Any amino acid
  VARIANT 32: note = Any amino acid
  VARIANT 33: note = Any amino acid
  VARIANT 34: note = Any amino acid
  VARIANT 35: note = Any amino acid
  VARIANT 36: note = Any amino acid
  VARIANT 37: note = Any amino acid
  VARIANT 38: note = Any amino acid
  VARIANT 39: note = Any amino acid
  VARIANT 40: note = Any amino acid
  VARIANT 41: note = Any amino acid
  VARIANT 42: note = Any amino acid
  VARIANT 43: note = Any amino acid
  VARIANT 44: note = Any amino acid
  VARIANT 45: note = Any amino acid
  VARIANT 46: note = Any amino acid
  VARIANT 47: note = Any amino acid
  VARIANT 48: note = Any amino acid
  VARIANT 49: note = Any amino acid
  VARIANT 50: note = Any amino acid
  VARIANT 51: note = Any amino acid
  VARIANT 52: note = Any amino acid
  VARIANT 53: note = Any amino acid
  VARIANT 54: note = Any amino acid
  VARIANT 55: note = Any amino acid
  VARIANT 56: note = Any amino acid
  VARIANT 58: note = Any amino acid
  VARIANT 59: note = Any amino acid
  VARIANT 60: note = Any amino acid
  VARIANT 61: note = Any amino acid
  VARIANT 62: note = Any amino acid
  VARIANT 63: note = Any amino acid
  VARIANT 64: note = Any amino acid
  VARIANT 65: note = Any amino acid
  VARIANT 66: note = Any amino acid
  VARIANT 67: note = Any amino acid
  VARIANT 68: note = Any amino acid
  VARIANT 69: note = Any amino acid
  VARIANT 70: note = Any amino acid
  VARIANT 71: note = Any amino acid
  VARIANT 72: note = Any amino acid
  VARIANT 73: note = Any amino acid
  VARIANT 74: note = Any amino acid
  VARIANT 75: note = Any amino acid
  VARIANT 76: note = Any amino acid
  VARIANT 77: note = Any amino acid
  VARIANT 78: note = Any amino acid
  VARIANT 79: note = Any amino acid
  VARIANT 80: note = Any amino acid
  VARIANT 81: note = Any amino acid
  VARIANT 82: note = Any amino acid
  VARIANT 83: note = Any amino acid
  VARIANT 84: note = Any amino acid
  VARIANT 85: note = Any amino acid
  VARIANT 86: note = Any amino acid
  VARIANT 87: note = Any amino acid
  VARIANT 88: note = Any amino acid
  VARIANT 89: note = Any amino acid
  VARIANT 90: note = Any amino acid
  VARIANT 91: note = Any amino acid
  VARIANT 92: note = Any amino acid
  VARIANT 93: note = Any amino acid
  VARIANT 94: note = Any amino acid
  VARIANT 95: note = Any amino acid
  VARIANT 96: note = Any amino acid
  VARIANT 97: note = Any amino acid
  VARIANT 99: note = Any amino acid
  VARIANT 101: note = Any amino acid
  VARIANT 102: note = Any amino acid
DXXXXXXXXXXXXXXXXXXXXXXXXXXXXXXXXXXXXXXXXXXXXXXXXXXXXXXXEXXXXXXXXXXXXXXXXXXXXXXXXXXXXXXXXXXXXXXXXKXDXXD

SEQ ID NO: 795609 - protein, 107 aa, unidentified
  VARIANT 2: note = Any amino acid
  VARIANT 3: note = Any amino acid
  VARIANT 4: note = Any amino acid
  VARIANT 5: note = Any amino acid
  VARIANT 6: note = Any amino acid
  VARIANT 7: note = Any amino acid
  VARIANT 8: note = Any amino acid
  VARIANT 9: note = Any amino acid
  VARIANT 10: note = Any amino acid
  VARIANT 11: note = Any amino acid
  VARIANT 12: note = Any amino acid
  VARIANT 13: note = Any amino acid
  VARIANT 14: note = Any amino acid
  VARIANT 15: note = Any amino acid
  VARIANT 16: note = Any amino acid
  VARIANT 17: note = Any amino acid
  VARIANT 18: note = Any amino acid
  VARIANT 19: note = Any amino acid
  VARIANT 20: note = Any amino acid
  VARIANT 21: note = Any amino acid
  VARIANT 22: note = Any amino acid
  VARIANT 23: note = Any amino acid
  VARIANT 24: note = Any amino acid
  VARIANT 25: note = Any amino acid
  VARIANT 26: note = Any amino acid
  VARIANT 27: note = Any amino acid
  VARIANT 28: note = Any amino acid
  VARIANT 29: note = Any amino acid
  VARIANT 30: note = Any amino acid
  VARIANT 31: note = Any amino acid
  VARIANT 32: note = Any amino acid
  VARIANT 33: note = Any amino acid
  VARIANT 34: note = Any amino acid
  VARIANT 35: note = Any amino acid
  VARIANT 36: note = Any amino acid
  VARIANT 37: note = Any amino acid
  VARIANT 38: note = Any amino acid
  VARIANT 39: note = Any amino acid
  VARIANT 40: note = Any amino acid
  VARIANT 41: note = Any amino acid
  VARIANT 42: note = Any amino acid
  VARIANT 43: note = Any amino acid
  VARIANT 44: note = Any amino acid
  VARIANT 45: note = Any amino acid
  VARIANT 46: note = Any amino acid
  VARIANT 47: note = Any amino acid
  VARIANT 48: note = Any amino acid
  VARIANT 49: note = Any amino acid
  VARIANT 50: note = Any amino acid
  VARIANT 51: note = Any amino acid
  VARIANT 52: note = Any amino acid
  VARIANT 53: note = Any amino acid
  VARIANT 54: note = Any amino acid
  VARIANT 55: note = Any amino acid
  VARIANT 57: note = Any amino acid
  VARIANT 58: note = Any amino acid
  VARIANT 59: note = Any amino acid
  VARIANT 60: note = Any amino acid
  VARIANT 61: note = Any amino acid
  VARIANT 62: note = Any amino acid
  VARIANT 63: note = Any amino acid
  VARIANT 64: note = Any amino acid
  VARIANT 65: note = Any amino acid
  VARIANT 66: note = Any amino acid
  VARIANT 67: note = Any amino acid
  VARIANT 68: note = Any amino acid
  VARIANT 69: note = Any amino acid
  VARIANT 70: note = Any amino acid
  VARIANT 71: note = Any amino acid
  VARIANT 72: note = Any amino acid
  VARIANT 73: note = Any amino acid
  VARIANT 74: note = Any amino acid
  VARIANT 75: note = Any amino acid
  VARIANT 76: note = Any amino acid
  VARIANT 77: note = Any amino acid
  VARIANT 78: note = Any amino acid
  VARIANT 79: note = Any amino acid
  VARIANT 80: note = Any amino acid
  VARIANT 81: note = Any amino acid
  VARIANT 82: note = Any amino acid
  VARIANT 83: note = Any amino acid
  VARIANT 84: note = Any amino acid
  VARIANT 85: note = Any amino acid
  VARIANT 86: note = Any amino acid
  VARIANT 87: note = Any amino acid
  VARIANT 88: note = Any amino acid
  VARIANT 89: note = Any amino acid
  VARIANT 90: note = Any amino acid
  VARIANT 91: note = Any amino acid
  VARIANT 92: note = Any amino acid
  VARIANT 93: note = Any amino acid
  VARIANT 94: note = Any amino acid
  VARIANT 95: note = Any amino acid
  VARIANT 96: note = Any amino acid
  VARIANT 97: note = Any amino acid
  VARIANT 98: note = Any amino acid
  VARIANT 99: note = Any amino acid
  VARIANT 100: note = Any amino acid
  VARIANT 101: note = Any amino acid
  VARIANT 103: note = Any amino acid
  VARIANT 105: note = Any amino acid
  VARIANT 106: note = Any amino acid
DXXXXXXXXXXXXXXXXXXXXXXXXXXXXXXXXXXXXXXXXXXXXXXXXXXXXXXEXXXXXXXXXXXXXXXXXXXXXXXXXXXXXXXXXXXXXXXXXXXXXKXDXXD

SEQ ID NO: 795610 - protein, 96 aa, unidentified
  VARIANT 2: note = Any amino acid
  VARIANT 3: note = Any amino acid
  VARIANT 4: note = Any amino acid
  VARIANT 5: note = Any amino acid
  VARIANT 6: note = Any amino acid
  VARIANT 7: note = Any amino acid
  VARIANT 8: note = Any amino acid
  VARIANT 9: note = Any amino acid
  VARIANT 10: note = Any amino acid
  VARIANT 11: note = Any amino acid
  VARIANT 12: note = Any amino acid
  VARIANT 13: note = Any amino acid
  VARIANT 14: note = Any amino acid
  VARIANT 15: note = Any amino acid
  VARIANT 16: note = Any amino acid
  VARIANT 17: note = Any amino acid
  VARIANT 18: note = Any amino acid
  VARIANT 19: note = Any amino acid
  VARIANT 20: note = Any amino acid
  VARIANT 21: note = Any amino acid
  VARIANT 22: note = Any amino acid
  VARIANT 23: note = Any amino acid
  VARIANT 24: note = Any amino acid
  VARIANT 25: note = Any amino acid
  VARIANT 26: note = Any amino acid
  VARIANT 27: note = Any amino acid
  VARIANT 28: note = Any amino acid
  VARIANT 29: note = Any amino acid
  VARIANT 30: note = Any amino acid
  VARIANT 31: note = Any amino acid
  VARIANT 32: note = Any amino acid
  VARIANT 33: note = Any amino acid
  VARIANT 34: note = Any amino acid
  VARIANT 35: note = Any amino acid
  VARIANT 36: note = Any amino acid
  VARIANT 37: note = Any amino acid
  VARIANT 38: note = Any amino acid
  VARIANT 39: note = Any amino acid
  VARIANT 40: note = Any amino acid
  VARIANT 41: note = Any amino acid
  VARIANT 42: note = Any amino acid
  VARIANT 43: note = Any amino acid
  VARIANT 44: note = Any amino acid
  VARIANT 45: note = Any amino acid
  VARIANT 46: note = Any amino acid
  VARIANT 47: note = Any amino acid
  VARIANT 48: note = Any amino acid
  VARIANT 49: note = Any amino acid
  VARIANT 50: note = Any amino acid
  VARIANT 52: note = Any amino acid
  VARIANT 53: note = Any amino acid
  VARIANT 54: note = Any amino acid
  VARIANT 55: note = Any amino acid
  VARIANT 56: note = Any amino acid
  VARIANT 57: note = Any amino acid
  VARIANT 58: note = Any amino acid
  VARIANT 59: note = Any amino acid
  VARIANT 60: note = Any amino acid
  VARIANT 61: note = Any amino acid
  VARIANT 62: note = Any amino acid
  VARIANT 63: note = Any amino acid
  VARIANT 64: note = Any amino acid
  VARIANT 65: note = Any amino acid
  VARIANT 66: note = Any amino acid
  VARIANT 67: note = Any amino acid
  VARIANT 68: note = Any amino acid
  VARIANT 69: note = Any amino acid
  VARIANT 70: note = Any amino acid
  VARIANT 71: note = Any amino acid
  VARIANT 72: note = Any amino acid
  VARIANT 73: note = Any amino acid
  VARIANT 74: note = Any amino acid
  VARIANT 75: note = Any amino acid
  VARIANT 76: note = Any amino acid
  VARIANT 77: note = Any amino acid
  VARIANT 78: note = Any amino acid
  VARIANT 79: note = Any amino acid
  VARIANT 80: note = Any amino acid
  VARIANT 81: note = Any amino acid
  VARIANT 82: note = Any amino acid
  VARIANT 83: note = Any amino acid
  VARIANT 84: note = Any amino acid
  VARIANT 85: note = Any amino acid
  VARIANT 86: note = Any amino acid
  VARIANT 87: note = Any amino acid
  VARIANT 88: note = Any amino acid
  VARIANT 89: note = Any amino acid
  VARIANT 90: note = Any amino acid
  VARIANT 92: note = Any amino acid
  VARIANT 94: note = Any amino acid
  VARIANT 95: note = Any amino acid
DXXXXXXXXXXXXXXXXXXXXXXXXXXXXXXXXXXXXXXXXXXXXXXXXXGXXXXXXXXXXXXXXXXXXXXXXXXXXXXXXXXXXXXXXXKXDXXD

SEQ ID NO: 795611 - protein, 88 aa, unidentified
  VARIANT 2: note = Any amino acid
  VARIANT 3: note = Any amino acid
  VARIANT 4: note = Any amino acid
  VARIANT 5: note = Any amino acid
  VARIANT 6: note = Any amino acid
  VARIANT 7: note = Any amino acid
  VARIANT 8: note = Any amino acid
  VARIANT 9: note = Any amino acid
  VARIANT 10: note = Any amino acid
  VARIANT 11: note = Any amino acid
  VARIANT 12: note = Any amino acid
  VARIANT 13: note = Any amino acid
  VARIANT 14: note = Any amino acid
  VARIANT 15: note = Any amino acid
  VARIANT 16: note = Any amino acid
  VARIANT 17: note = Any amino acid
  VARIANT 18: note = Any amino acid
  VARIANT 19: note = Any amino acid
  VARIANT 20: note = Any amino acid
  VARIANT 21: note = Any amino acid
  VARIANT 22: note = Any amino acid
  VARIANT 23: note = Any amino acid
  VARIANT 24: note = Any amino acid
  VARIANT 25: note = Any amino acid
  VARIANT 26: note = Any amino acid
  VARIANT 27: note = Any amino acid
  VARIANT 28: note = Any amino acid
  VARIANT 29: note = Any amino acid
  VARIANT 30: note = Any amino acid
  VARIANT 31: note = Any amino acid
  VARIANT 32: note = Any amino acid
  VARIANT 33: note = Any amino acid
  VARIANT 34: note = Any amino acid
  VARIANT 35: note = Any amino acid
  VARIANT 36: note = Any amino acid
  VARIANT 37: note = Any amino acid
  VARIANT 38: note = Any amino acid
  VARIANT 39: note = Any amino acid
  VARIANT 40: note = Any amino acid
  VARIANT 41: note = Any amino acid
  VARIANT 42: note = Any amino acid
  VARIANT 43: note = Any amino acid
  VARIANT 44: note = Any amino acid
  VARIANT 45: note = Any amino acid
  VARIANT 46: note = Any amino acid
  VARIANT 47: note = Any amino acid
  VARIANT 49: note = Any amino acid
  VARIANT 50: note = Any amino acid
  VARIANT 51: note = Any amino acid
  VARIANT 52: note = Any amino acid
  VARIANT 53: note = Any amino acid
  VARIANT 54: note = Any amino acid
  VARIANT 55: note = Any amino acid
  VARIANT 56: note = Any amino acid
  VARIANT 57: note = Any amino acid
  VARIANT 58: note = Any amino acid
  VARIANT 59: note = Any amino acid
  VARIANT 60: note = Any amino acid
  VARIANT 61: note = Any amino acid
  VARIANT 62: note = Any amino acid
  VARIANT 63: note = Any amino acid
  VARIANT 64: note = Any amino acid
  VARIANT 65: note = Any amino acid
  VARIANT 66: note = Any amino acid
  VARIANT 67: note = Any amino acid
  VARIANT 68: note = Any amino acid
  VARIANT 69: note = Any amino acid
  VARIANT 70: note = Any amino acid
  VARIANT 71: note = Any amino acid
  VARIANT 72: note = Any amino acid
  VARIANT 73: note = Any amino acid
  VARIANT 74: note = Any amino acid
  VARIANT 75: note = Any amino acid
  VARIANT 76: note = Any amino acid
  VARIANT 77: note = Any amino acid
  VARIANT 78: note = Any amino acid
  VARIANT 79: note = Any amino acid
  VARIANT 80: note = Any amino acid
  VARIANT 81: note = Any amino acid
  VARIANT 82: note = Any amino acid
  VARIANT 84: note = Any amino acid
  VARIANT 86: note = Any amino acid
  VARIANT 87: note = Any amino acid
DXXXXXXXXXXXXXXXXXXXXXXXXXXXXXXXXXXXXXXXXXXXXXXQXXXXXXXXXXXXXXXXXXXXXXXXXXXXXXXXXXKXDXXE

SEQ ID NO: 795612 - protein, 92 aa, unidentified
  VARIANT 2: note = Any amino acid
  VARIANT 3: note = Any amino acid
  VARIANT 4: note = Any amino acid
  VARIANT 5: note = Any amino acid
  VARIANT 6: note = Any amino acid
  VARIANT 7: note = Any amino acid
  VARIANT 8: note = Any amino acid
  VARIANT 9: note = Any amino acid
  VARIANT 10: note = Any amino acid
  VARIANT 11: note = Any amino acid
  VARIANT 12: note = Any amino acid
  VARIANT 13: note = Any amino acid
  VARIANT 14: note = Any amino acid
  VARIANT 15: note = Any amino acid
  VARIANT 16: note = Any amino acid
  VARIANT 17: note = Any amino acid
  VARIANT 18: note = Any amino acid
  VARIANT 19: note = Any amino acid
  VARIANT 20: note = Any amino acid
  VARIANT 21: note = Any amino acid
  VARIANT 22: note = Any amino acid
  VARIANT 23: note = Any amino acid
  VARIANT 24: note = Any amino acid
  VARIANT 25: note = Any amino acid
  VARIANT 26: note = Any amino acid
  VARIANT 27: note = Any amino acid
  VARIANT 28: note = Any amino acid
  VARIANT 29: note = Any amino acid
  VARIANT 30: note = Any amino acid
  VARIANT 31: note = Any amino acid
  VARIANT 32: note = Any amino acid
  VARIANT 33: note = Any amino acid
  VARIANT 34: note = Any amino acid
  VARIANT 35: note = Any amino acid
  VARIANT 36: note = Any amino acid
  VARIANT 37: note = Any amino acid
  VARIANT 38: note = Any amino acid
  VARIANT 39: note = Any amino acid
  VARIANT 40: note = Any amino acid
  VARIANT 41: note = Any amino acid
  VARIANT 42: note = Any amino acid
  VARIANT 43: note = Any amino acid
  VARIANT 44: note = Any amino acid
  VARIANT 45: note = Any amino acid
  VARIANT 46: note = Any amino acid
  VARIANT 47: note = Any amino acid
  VARIANT 48: note = Any amino acid
  VARIANT 49: note = Any amino acid
  VARIANT 50: note = Any amino acid
  VARIANT 51: note = Any amino acid
  VARIANT 52: note = Any amino acid
  VARIANT 54: note = Any amino acid
  VARIANT 55: note = Any amino acid
  VARIANT 56: note = Any amino acid
  VARIANT 57: note = Any amino acid
  VARIANT 58: note = Any amino acid
  VARIANT 59: note = Any amino acid
  VARIANT 60: note = Any amino acid
  VARIANT 61: note = Any amino acid
  VARIANT 62: note = Any amino acid
  VARIANT 63: note = Any amino acid
  VARIANT 64: note = Any amino acid
  VARIANT 65: note = Any amino acid
  VARIANT 66: note = Any amino acid
  VARIANT 67: note = Any amino acid
  VARIANT 68: note = Any amino acid
  VARIANT 69: note = Any amino acid
  VARIANT 70: note = Any amino acid
  VARIANT 71: note = Any amino acid
  VARIANT 72: note = Any amino acid
  VARIANT 73: note = Any amino acid
  VARIANT 74: note = Any amino acid
  VARIANT 75: note = Any amino acid
  VARIANT 76: note = Any amino acid
  VARIANT 77: note = Any amino acid
  VARIANT 78: note = Any amino acid
  VARIANT 79: note = Any amino acid
  VARIANT 80: note = Any amino acid
  VARIANT 81: note = Any amino acid
  VARIANT 82: note = Any amino acid
  VARIANT 83: note = Any amino acid
  VARIANT 84: note = Any amino acid
  VARIANT 85: note = Any amino acid
  VARIANT 86: note = Any amino acid
  VARIANT 88: note = Any amino acid
  VARIANT 90: note = Any amino acid
  VARIANT 91: note = Any amino acid
DXXXXXXXXXXXXXXXXXXXXXXXXXXXXXXXXXXXXXXXXXXXXXXXXXXXEXXXXXXXXXXXXXXXXXXXXXXXXXXXXXXXXXKXDXXD

SEQ ID NO: 795613 - protein, 99 aa, unidentified
  VARIANT 2: note = Any amino acid
  VARIANT 3: note = Any amino acid
  VARIANT 4: note = Any amino acid
  VARIANT 5: note = Any amino acid
  VARIANT 6: note = Any amino acid
  VARIANT 7: note = Any amino acid
  VARIANT 8: note = Any amino acid
  VARIANT 9: note = Any amino acid
  VARIANT 10: note = Any amino acid
  VARIANT 11: note = Any amino acid
  VARIANT 12: note = Any amino acid
  VARIANT 13: note = Any amino acid
  VARIANT 14: note = Any amino acid
  VARIANT 15: note = Any amino acid
  VARIANT 16: note = Any amino acid
  VARIANT 17: note = Any amino acid
  VARIANT 18: note = Any amino acid
  VARIANT 19: note = Any amino acid
  VARIANT 20: note = Any amino acid
  VARIANT 21: note = Any amino acid
  VARIANT 22: note = Any amino acid
  VARIANT 23: note = Any amino acid
  VARIANT 24: note = Any amino acid
  VARIANT 25: note = Any amino acid
  VARIANT 26: note = Any amino acid
  VARIANT 27: note = Any amino acid
  VARIANT 28: note = Any amino acid
  VARIANT 29: note = Any amino acid
  VARIANT 30: note = Any amino acid
  VARIANT 31: note = Any amino acid
  VARIANT 32: note = Any amino acid
  VARIANT 33: note = Any amino acid
  VARIANT 34: note = Any amino acid
  VARIANT 35: note = Any amino acid
  VARIANT 36: note = Any amino acid
  VARIANT 37: note = Any amino acid
  VARIANT 38: note = Any amino acid
  VARIANT 39: note = Any amino acid
  VARIANT 40: note = Any amino acid
  VARIANT 41: note = Any amino acid
  VARIANT 42: note = Any amino acid
  VARIANT 43: note = Any amino acid
  VARIANT 44: note = Any amino acid
  VARIANT 45: note = Any amino acid
  VARIANT 46: note = Any amino acid
  VARIANT 47: note = Any amino acid
  VARIANT 48: note = Any amino acid
  VARIANT 49: note = Any amino acid
  VARIANT 50: note = Any amino acid
  VARIANT 51: note = Any amino acid
  VARIANT 52: note = Any amino acid
  VARIANT 54: note = Any amino acid
  VARIANT 55: note = Any amino acid
  VARIANT 56: note = Any amino acid
  VARIANT 57: note = Any amino acid
  VARIANT 58: note = Any amino acid
  VARIANT 59: note = Any amino acid
  VARIANT 60: note = Any amino acid
  VARIANT 61: note = Any amino acid
  VARIANT 62: note = Any amino acid
  VARIANT 63: note = Any amino acid
  VARIANT 64: note = Any amino acid
  VARIANT 65: note = Any amino acid
  VARIANT 66: note = Any amino acid
  VARIANT 67: note = Any amino acid
  VARIANT 68: note = Any amino acid
  VARIANT 69: note = Any amino acid
  VARIANT 70: note = Any amino acid
  VARIANT 71: note = Any amino acid
  VARIANT 72: note = Any amino acid
  VARIANT 73: note = Any amino acid
  VARIANT 74: note = Any amino acid
  VARIANT 75: note = Any amino acid
  VARIANT 76: note = Any amino acid
  VARIANT 77: note = Any amino acid
  VARIANT 78: note = Any amino acid
  VARIANT 79: note = Any amino acid
  VARIANT 80: note = Any amino acid
  VARIANT 81: note = Any amino acid
  VARIANT 82: note = Any amino acid
  VARIANT 83: note = Any amino acid
  VARIANT 84: note = Any amino acid
  VARIANT 85: note = Any amino acid
  VARIANT 86: note = Any amino acid
  VARIANT 87: note = Any amino acid
  VARIANT 88: note = Any amino acid
  VARIANT 89: note = Any amino acid
  VARIANT 90: note = Any amino acid
  VARIANT 91: note = Any amino acid
  VARIANT 92: note = Any amino acid
  VARIANT 93: note = Any amino acid
  VARIANT 95: note = Any amino acid
  VARIANT 97: note = Any amino acid
  VARIANT 98: note = Any amino acid
DXXXXXXXXXXXXXXXXXXXXXXXXXXXXXXXXXXXXXXXXXXXXXXXXXXXEXXXXXXXXXXXXXXXXXXXXXXXXXXXXXXXXXXXXXXXXKXDXXD

SEQ ID NO: 795614 - protein, 94 aa, unidentified
  VARIANT 2: note = Any amino acid
  VARIANT 3: note = Any amino acid
  VARIANT 4: note = Any amino acid
  VARIANT 5: note = Any amino acid
  VARIANT 6: note = Any amino acid
  VARIANT 7: note = Any amino acid
  VARIANT 8: note = Any amino acid
  VARIANT 9: note = Any amino acid
  VARIANT 10: note = Any amino acid
  VARIANT 11: note = Any amino acid
  VARIANT 12: note = Any amino acid
  VARIANT 13: note = Any amino acid
  VARIANT 14: note = Any amino acid
  VARIANT 15: note = Any amino acid
  VARIANT 16: note = Any amino acid
  VARIANT 17: note = Any amino acid
  VARIANT 18: note = Any amino acid
  VARIANT 19: note = Any amino acid
  VARIANT 20: note = Any amino acid
  VARIANT 21: note = Any amino acid
  VARIANT 22: note = Any amino acid
  VARIANT 23: note = Any amino acid
  VARIANT 24: note = Any amino acid
  VARIANT 25: note = Any amino acid
  VARIANT 26: note = Any amino acid
  VARIANT 27: note = Any amino acid
  VARIANT 28: note = Any amino acid
  VARIANT 29: note = Any amino acid
  VARIANT 30: note = Any amino acid
  VARIANT 31: note = Any amino acid
  VARIANT 32: note = Any amino acid
  VARIANT 33: note = Any amino acid
  VARIANT 34: note = Any amino acid
  VARIANT 35: note = Any amino acid
  VARIANT 36: note = Any amino acid
  VARIANT 37: note = Any amino acid
  VARIANT 38: note = Any amino acid
  VARIANT 39: note = Any amino acid
  VARIANT 40: note = Any amino acid
  VARIANT 41: note = Any amino acid
  VARIANT 42: note = Any amino acid
  VARIANT 43: note = Any amino acid
  VARIANT 44: note = Any amino acid
  VARIANT 45: note = Any amino acid
  VARIANT 46: note = Any amino acid
  VARIANT 47: note = Any amino acid
  VARIANT 48: note = Any amino acid
  VARIANT 50: note = Any amino acid
  VARIANT 51: note = Any amino acid
  VARIANT 52: note = Any amino acid
  VARIANT 53: note = Any amino acid
  VARIANT 54: note = Any amino acid
  VARIANT 55: note = Any amino acid
  VARIANT 56: note = Any amino acid
  VARIANT 57: note = Any amino acid
  VARIANT 58: note = Any amino acid
  VARIANT 59: note = Any amino acid
  VARIANT 60: note = Any amino acid
  VARIANT 61: note = Any amino acid
  VARIANT 62: note = Any amino acid
  VARIANT 63: note = Any amino acid
  VARIANT 64: note = Any amino acid
  VARIANT 65: note = Any amino acid
  VARIANT 66: note = Any amino acid
  VARIANT 67: note = Any amino acid
  VARIANT 68: note = Any amino acid
  VARIANT 69: note = Any amino acid
  VARIANT 70: note = Any amino acid
  VARIANT 71: note = Any amino acid
  VARIANT 72: note = Any amino acid
  VARIANT 73: note = Any amino acid
  VARIANT 74: note = Any amino acid
  VARIANT 75: note = Any amino acid
  VARIANT 76: note = Any amino acid
  VARIANT 77: note = Any amino acid
  VARIANT 78: note = Any amino acid
  VARIANT 79: note = Any amino acid
  VARIANT 80: note = Any amino acid
  VARIANT 81: note = Any amino acid
  VARIANT 82: note = Any amino acid
  VARIANT 83: note = Any amino acid
  VARIANT 84: note = Any amino acid
  VARIANT 85: note = Any amino acid
  VARIANT 86: note = Any amino acid
  VARIANT 87: note = Any amino acid
  VARIANT 88: note = Any amino acid
  VARIANT 90: note = Any amino acid
  VARIANT 92: note = Any amino acid
  VARIANT 93: note = Any amino acid
DXXXXXXXXXXXXXXXXXXXXXXXXXXXXXXXXXXXXXXXXXXXXXXXDXXXXXXXXXXXXXXXXXXXXXXXXXXXXXXXXXXXXXXXKXDXXD

SEQ ID NO: 795615 - protein, 93 aa, unidentified
  VARIANT 2: note = Any amino acid
  VARIANT 3: note = Any amino acid
  VARIANT 4: note = Any amino acid
  VARIANT 5: note = Any amino acid
  VARIANT 6: note = Any amino acid
  VARIANT 7: note = Any amino acid
  VARIANT 8: note = Any amino acid
  VARIANT 9: note = Any amino acid
  VARIANT 10: note = Any amino acid
  VARIANT 11: note = Any amino acid
  VARIANT 12: note = Any amino acid
  VARIANT 13: note = Any amino acid
  VARIANT 14: note = Any amino acid
  VARIANT 15: note = Any amino acid
  VARIANT 16: note = Any amino acid
  VARIANT 17: note = Any amino acid
  VARIANT 18: note = Any amino acid
  VARIANT 19: note = Any amino acid
  VARIANT 20: note = Any amino acid
  VARIANT 21: note = Any amino acid
  VARIANT 22: note = Any amino acid
  VARIANT 23: note = Any amino acid
  VARIANT 24: note = Any amino acid
  VARIANT 25: note = Any amino acid
  VARIANT 26: note = Any amino acid
  VARIANT 27: note = Any amino acid
  VARIANT 28: note = Any amino acid
  VARIANT 29: note = Any amino acid
  VARIANT 30: note = Any amino acid
  VARIANT 31: note = Any amino acid
  VARIANT 32: note = Any amino acid
  VARIANT 33: note = Any amino acid
  VARIANT 34: note = Any amino acid
  VARIANT 35: note = Any amino acid
  VARIANT 36: note = Any amino acid
  VARIANT 37: note = Any amino acid
  VARIANT 38: note = Any amino acid
  VARIANT 39: note = Any amino acid
  VARIANT 40: note = Any amino acid
  VARIANT 41: note = Any amino acid
  VARIANT 42: note = Any amino acid
  VARIANT 43: note = Any amino acid
  VARIANT 44: note = Any amino acid
  VARIANT 45: note = Any amino acid
  VARIANT 46: note = Any amino acid
  VARIANT 47: note = Any amino acid
  VARIANT 48: note = Any amino acid
  VARIANT 49: note = Any amino acid
  VARIANT 50: note = Any amino acid
  VARIANT 51: note = Any amino acid
  VARIANT 52: note = Any amino acid
  VARIANT 54: note = Any amino acid
  VARIANT 55: note = Any amino acid
  VARIANT 56: note = Any amino acid
  VARIANT 57: note = Any amino acid
  VARIANT 58: note = Any amino acid
  VARIANT 59: note = Any amino acid
  VARIANT 60: note = Any amino acid
  VARIANT 61: note = Any amino acid
  VARIANT 62: note = Any amino acid
  VARIANT 63: note = Any amino acid
  VARIANT 64: note = Any amino acid
  VARIANT 65: note = Any amino acid
  VARIANT 66: note = Any amino acid
  VARIANT 67: note = Any amino acid
  VARIANT 68: note = Any amino acid
  VARIANT 69: note = Any amino acid
  VARIANT 70: note = Any amino acid
  VARIANT 71: note = Any amino acid
  VARIANT 72: note = Any amino acid
  VARIANT 73: note = Any amino acid
  VARIANT 74: note = Any amino acid
  VARIANT 75: note = Any amino acid
  VARIANT 76: note = Any amino acid
  VARIANT 77: note = Any amino acid
  VARIANT 78: note = Any amino acid
  VARIANT 79: note = Any amino acid
  VARIANT 80: note = Any amino acid
  VARIANT 81: note = Any amino acid
  VARIANT 82: note = Any amino acid
  VARIANT 83: note = Any amino acid
  VARIANT 84: note = Any amino acid
  VARIANT 85: note = Any amino acid
  VARIANT 86: note = Any amino acid
  VARIANT 87: note = Any amino acid
  VARIANT 89: note = Any amino acid
  VARIANT 91: note = Any amino acid
  VARIANT 92: note = Any amino acid
DXXXXXXXXXXXXXXXXXXXXXXXXXXXXXXXXXXXXXXXXXXXXXXXXXXXEXXXXXXXXXXXXXXXXXXXXXXXXXXXXXXXXXXKXDXXD

SEQ ID NO: 795616 - protein, 99 aa, unidentified
  VARIANT 2: note = Any amino acid
  VARIANT 3: note = Any amino acid
  VARIANT 4: note = Any amino acid
  VARIANT 5: note = Any amino acid
  VARIANT 6: note = Any amino acid
  VARIANT 7: note = Any amino acid
  VARIANT 8: note = Any amino acid
  VARIANT 9: note = Any amino acid
  VARIANT 10: note = Any amino acid
  VARIANT 11: note = Any amino acid
  VARIANT 12: note = Any amino acid
  VARIANT 13: note = Any amino acid
  VARIANT 14: note = Any amino acid
  VARIANT 15: note = Any amino acid
  VARIANT 16: note = Any amino acid
  VARIANT 17: note = Any amino acid
  VARIANT 18: note = Any amino acid
  VARIANT 19: note = Any amino acid
  VARIANT 20: note = Any amino acid
  VARIANT 21: note = Any amino acid
  VARIANT 22: note = Any amino acid
  VARIANT 23: note = Any amino acid
  VARIANT 24: note = Any amino acid
  VARIANT 25: note = Any amino acid
  VARIANT 26: note = Any amino acid
  VARIANT 27: note = Any amino acid
  VARIANT 28: note = Any amino acid
  VARIANT 29: note = Any amino acid
  VARIANT 30: note = Any amino acid
  VARIANT 31: note = Any amino acid
  VARIANT 32: note = Any amino acid
  VARIANT 33: note = Any amino acid
  VARIANT 34: note = Any amino acid
  VARIANT 35: note = Any amino acid
  VARIANT 36: note = Any amino acid
  VARIANT 37: note = Any amino acid
  VARIANT 38: note = Any amino acid
  VARIANT 39: note = Any amino acid
  VARIANT 40: note = Any amino acid
  VARIANT 41: note = Any amino acid
  VARIANT 42: note = Any amino acid
  VARIANT 43: note = Any amino acid
  VARIANT 44: note = Any amino acid
  VARIANT 45: note = Any amino acid
  VARIANT 46: note = Any amino acid
  VARIANT 47: note = Any amino acid
  VARIANT 48: note = Any amino acid
  VARIANT 49: note = Any amino acid
  VARIANT 50: note = Any amino acid
  VARIANT 51: note = Any amino acid
  VARIANT 52: note = Any amino acid
  VARIANT 53: note = Any amino acid
  VARIANT 55: note = Any amino acid
  VARIANT 56: note = Any amino acid
  VARIANT 57: note = Any amino acid
  VARIANT 58: note = Any amino acid
  VARIANT 59: note = Any amino acid
  VARIANT 60: note = Any amino acid
  VARIANT 61: note = Any amino acid
  VARIANT 62: note = Any amino acid
  VARIANT 63: note = Any amino acid
  VARIANT 64: note = Any amino acid
  VARIANT 65: note = Any amino acid
  VARIANT 66: note = Any amino acid
  VARIANT 67: note = Any amino acid
  VARIANT 68: note = Any amino acid
  VARIANT 69: note = Any amino acid
  VARIANT 70: note = Any amino acid
  VARIANT 71: note = Any amino acid
  VARIANT 72: note = Any amino acid
  VARIANT 73: note = Any amino acid
  VARIANT 74: note = Any amino acid
  VARIANT 75: note = Any amino acid
  VARIANT 76: note = Any amino acid
  VARIANT 77: note = Any amino acid
  VARIANT 78: note = Any amino acid
  VARIANT 79: note = Any amino acid
  VARIANT 80: note = Any amino acid
  VARIANT 81: note = Any amino acid
  VARIANT 82: note = Any amino acid
  VARIANT 83: note = Any amino acid
  VARIANT 84: note = Any amino acid
  VARIANT 85: note = Any amino acid
  VARIANT 86: note = Any amino acid
  VARIANT 87: note = Any amino acid
  VARIANT 88: note = Any amino acid
  VARIANT 89: note = Any amino acid
  VARIANT 90: note = Any amino acid
  VARIANT 91: note = Any amino acid
  VARIANT 92: note = Any amino acid
  VARIANT 93: note = Any amino acid
  VARIANT 95: note = Any amino acid
  VARIANT 97: note = Any amino acid
  VARIANT 98: note = Any amino acid
DXXXXXXXXXXXXXXXXXXXXXXXXXXXXXXXXXXXXXXXXXXXXXXXXXXXXGXXXXXXXXXXXXXXXXXXXXXXXXXXXXXXXXXXXXXXXKXDXXD

SEQ ID NO: 795617 - protein, 103 aa, unidentified
  VARIANT 2: note = Any amino acid
  VARIANT 3: note = Any amino acid
  VARIANT 4: note = Any amino acid
  VARIANT 5: note = Any amino acid
  VARIANT 6: note = Any amino acid
  VARIANT 7: note = Any amino acid
  VARIANT 8: note = Any amino acid
  VARIANT 9: note = Any amino acid
  VARIANT 10: note = Any amino acid
  VARIANT 11: note = Any amino acid
  VARIANT 12: note = Any amino acid
  VARIANT 13: note = Any amino acid
  VARIANT 14: note = Any amino acid
  VARIANT 15: note = Any amino acid
  VARIANT 16: note = Any amino acid
  VARIANT 17: note = Any amino acid
  VARIANT 18: note = Any amino acid
  VARIANT 19: note = Any amino acid
  VARIANT 20: note = Any amino acid
  VARIANT 21: note = Any amino acid
  VARIANT 22: note = Any amino acid
  VARIANT 23: note = Any amino acid
  VARIANT 24: note = Any amino acid
  VARIANT 25: note = Any amino acid
  VARIANT 26: note = Any amino acid
  VARIANT 27: note = Any amino acid
  VARIANT 28: note = Any amino acid
  VARIANT 29: note = Any amino acid
  VARIANT 30: note = Any amino acid
  VARIANT 31: note = Any amino acid
  VARIANT 32: note = Any amino acid
  VARIANT 33: note = Any amino acid
  VARIANT 34: note = Any amino acid
  VARIANT 35: note = Any amino acid
  VARIANT 36: note = Any amino acid
  VARIANT 37: note = Any amino acid
  VARIANT 38: note = Any amino acid
  VARIANT 39: note = Any amino acid
  VARIANT 40: note = Any amino acid
  VARIANT 41: note = Any amino acid
  VARIANT 42: note = Any amino acid
  VARIANT 43: note = Any amino acid
  VARIANT 44: note = Any amino acid
  VARIANT 45: note = Any amino acid
  VARIANT 46: note = Any amino acid
  VARIANT 47: note = Any amino acid
  VARIANT 48: note = Any amino acid
  VARIANT 49: note = Any amino acid
  VARIANT 50: note = Any amino acid
  VARIANT 51: note = Any amino acid
  VARIANT 52: note = Any amino acid
  VARIANT 53: note = Any amino acid
  VARIANT 54: note = Any amino acid
  VARIANT 55: note = Any amino acid
  VARIANT 56: note = Any amino acid
  VARIANT 57: note = Any amino acid
  VARIANT 59: note = Any amino acid
  VARIANT 60: note = Any amino acid
  VARIANT 61: note = Any amino acid
  VARIANT 62: note = Any amino acid
  VARIANT 63: note = Any amino acid
  VARIANT 64: note = Any amino acid
  VARIANT 65: note = Any amino acid
  VARIANT 66: note = Any amino acid
  VARIANT 67: note = Any amino acid
  VARIANT 68: note = Any amino acid
  VARIANT 69: note = Any amino acid
  VARIANT 70: note = Any amino acid
  VARIANT 71: note = Any amino acid
  VARIANT 72: note = Any amino acid
  VARIANT 73: note = Any amino acid
  VARIANT 74: note = Any amino acid
  VARIANT 75: note = Any amino acid
  VARIANT 76: note = Any amino acid
  VARIANT 77: note = Any amino acid
  VARIANT 78: note = Any amino acid
  VARIANT 79: note = Any amino acid
  VARIANT 80: note = Any amino acid
  VARIANT 81: note = Any amino acid
  VARIANT 82: note = Any amino acid
  VARIANT 83: note = Any amino acid
  VARIANT 84: note = Any amino acid
  VARIANT 85: note = Any amino acid
  VARIANT 86: note = Any amino acid
  VARIANT 87: note = Any amino acid
  VARIANT 88: note = Any amino acid
  VARIANT 89: note = Any amino acid
  VARIANT 90: note = Any amino acid
  VARIANT 91: note = Any amino acid
  VARIANT 92: note = Any amino acid
  VARIANT 93: note = Any amino acid
  VARIANT 94: note = Any amino acid
  VARIANT 95: note = Any amino acid
  VARIANT 96: note = Any amino acid
  VARIANT 97: note = Any amino acid
  VARIANT 99: note = Any amino acid
  VARIANT 101: note = Any amino acid
  VARIANT 102: note = Any amino acid
DXXXXXXXXXXXXXXXXXXXXXXXXXXXXXXXXXXXXXXXXXXXXXXXXXXXXXXXXEXXXXXXXXXXXXXXXXXXXXXXXXXXXXXXXXXXXXXXXKXDXXD

SEQ ID NO: 795618 - protein, 95 aa, unidentified
  VARIANT 2: note = Any amino acid
  VARIANT 3: note = Any amino acid
  VARIANT 4: note = Any amino acid
  VARIANT 5: note = Any amino acid
  VARIANT 6: note = Any amino acid
  VARIANT 7: note = Any amino acid
  VARIANT 8: note = Any amino acid
  VARIANT 9: note = Any amino acid
  VARIANT 10: note = Any amino acid
  VARIANT 11: note = Any amino acid
  VARIANT 12: note = Any amino acid
  VARIANT 13: note = Any amino acid
  VARIANT 14: note = Any amino acid
  VARIANT 15: note = Any amino acid
  VARIANT 16: note = Any amino acid
  VARIANT 17: note = Any amino acid
  VARIANT 18: note = Any amino acid
  VARIANT 19: note = Any amino acid
  VARIANT 20: note = Any amino acid
  VARIANT 21: note = Any amino acid
  VARIANT 22: note = Any amino acid
  VARIANT 23: note = Any amino acid
  VARIANT 24: note = Any amino acid
  VARIANT 25: note = Any amino acid
  VARIANT 26: note = Any amino acid
  VARIANT 27: note = Any amino acid
  VARIANT 28: note = Any amino acid
  VARIANT 29: note = Any amino acid
  VARIANT 30: note = Any amino acid
  VARIANT 31: note = Any amino acid
  VARIANT 32: note = Any amino acid
  VARIANT 33: note = Any amino acid
  VARIANT 34: note = Any amino acid
  VARIANT 35: note = Any amino acid
  VARIANT 36: note = Any amino acid
  VARIANT 37: note = Any amino acid
  VARIANT 38: note = Any amino acid
  VARIANT 39: note = Any amino acid
  VARIANT 40: note = Any amino acid
  VARIANT 41: note = Any amino acid
  VARIANT 42: note = Any amino acid
  VARIANT 43: note = Any amino acid
  VARIANT 44: note = Any amino acid
  VARIANT 45: note = Any amino acid
  VARIANT 46: note = Any amino acid
  VARIANT 47: note = Any amino acid
  VARIANT 48: note = Any amino acid
  VARIANT 49: note = Any amino acid
  VARIANT 50: note = Any amino acid
  VARIANT 52: note = Any amino acid
  VARIANT 53: note = Any amino acid
  VARIANT 54: note = Any amino acid
  VARIANT 55: note = Any amino acid
  VARIANT 56: note = Any amino acid
  VARIANT 57: note = Any amino acid
  VARIANT 58: note = Any amino acid
  VARIANT 59: note = Any amino acid
  VARIANT 60: note = Any amino acid
  VARIANT 61: note = Any amino acid
  VARIANT 62: note = Any amino acid
  VARIANT 63: note = Any amino acid
  VARIANT 64: note = Any amino acid
  VARIANT 65: note = Any amino acid
  VARIANT 66: note = Any amino acid
  VARIANT 67: note = Any amino acid
  VARIANT 68: note = Any amino acid
  VARIANT 69: note = Any amino acid
  VARIANT 70: note = Any amino acid
  VARIANT 71: note = Any amino acid
  VARIANT 72: note = Any amino acid
  VARIANT 73: note = Any amino acid
  VARIANT 74: note = Any amino acid
  VARIANT 75: note = Any amino acid
  VARIANT 76: note = Any amino acid
  VARIANT 77: note = Any amino acid
  VARIANT 78: note = Any amino acid
  VARIANT 79: note = Any amino acid
  VARIANT 80: note = Any amino acid
  VARIANT 81: note = Any amino acid
  VARIANT 82: note = Any amino acid
  VARIANT 83: note = Any amino acid
  VARIANT 84: note = Any amino acid
  VARIANT 85: note = Any amino acid
  VARIANT 86: note = Any amino acid
  VARIANT 87: note = Any amino acid
  VARIANT 88: note = Any amino acid
  VARIANT 89: note = Any amino acid
  VARIANT 91: note = Any amino acid
  VARIANT 93: note = Any amino acid
  VARIANT 94: note = Any amino acid
DXXXXXXXXXXXXXXXXXXXXXXXXXXXXXXXXXXXXXXXXXXXXXXXXXEXXXXXXXXXXXXXXXXXXXXXXXXXXXXXXXXXXXXXXKXDXXD

SEQ ID NO: 795619 - protein, 89 aa, unidentified
  VARIANT 2: note = Any amino acid
  VARIANT 3: note = Any amino acid
  VARIANT 4: note = Any amino acid
  VARIANT 5: note = Any amino acid
  VARIANT 6: note = Any amino acid
  VARIANT 7: note = Any amino acid
  VARIANT 8: note = Any amino acid
  VARIANT 9: note = Any amino acid
  VARIANT 10: note = Any amino acid
  VARIANT 11: note = Any amino acid
  VARIANT 12: note = Any amino acid
  VARIANT 13: note = Any amino acid
  VARIANT 14: note = Any amino acid
  VARIANT 15: note = Any amino acid
  VARIANT 16: note = Any amino acid
  VARIANT 17: note = Any amino acid
  VARIANT 18: note = Any amino acid
  VARIANT 19: note = Any amino acid
  VARIANT 20: note = Any amino acid
  VARIANT 21: note = Any amino acid
  VARIANT 22: note = Any amino acid
  VARIANT 23: note = Any amino acid
  VARIANT 24: note = Any amino acid
  VARIANT 25: note = Any amino acid
  VARIANT 26: note = Any amino acid
  VARIANT 27: note = Any amino acid
  VARIANT 28: note = Any amino acid
  VARIANT 29: note = Any amino acid
  VARIANT 30: note = Any amino acid
  VARIANT 31: note = Any amino acid
  VARIANT 32: note = Any amino acid
  VARIANT 33: note = Any amino acid
  VARIANT 34: note = Any amino acid
  VARIANT 35: note = Any amino acid
  VARIANT 36: note = Any amino acid
  VARIANT 37: note = Any amino acid
  VARIANT 38: note = Any amino acid
  VARIANT 39: note = Any amino acid
  VARIANT 40: note = Any amino acid
  VARIANT 41: note = Any amino acid
  VARIANT 42: note = Any amino acid
  VARIANT 43: note = Any amino acid
  VARIANT 44: note = Any amino acid
  VARIANT 45: note = Any amino acid
  VARIANT 46: note = Any amino acid
  VARIANT 47: note = Any amino acid
  VARIANT 48: note = Any amino acid
  VARIANT 50: note = Any amino acid
  VARIANT 51: note = Any amino acid
  VARIANT 52: note = Any amino acid
  VARIANT 53: note = Any amino acid
  VARIANT 54: note = Any amino acid
  VARIANT 55: note = Any amino acid
  VARIANT 56: note = Any amino acid
  VARIANT 57: note = Any amino acid
  VARIANT 58: note = Any amino acid
  VARIANT 59: note = Any amino acid
  VARIANT 60: note = Any amino acid
  VARIANT 61: note = Any amino acid
  VARIANT 62: note = Any amino acid
  VARIANT 63: note = Any amino acid
  VARIANT 64: note = Any amino acid
  VARIANT 65: note = Any amino acid
  VARIANT 66: note = Any amino acid
  VARIANT 67: note = Any amino acid
  VARIANT 68: note = Any amino acid
  VARIANT 69: note = Any amino acid
  VARIANT 70: note = Any amino acid
  VARIANT 71: note = Any amino acid
  VARIANT 72: note = Any amino acid
  VARIANT 73: note = Any amino acid
  VARIANT 74: note = Any amino acid
  VARIANT 75: note = Any amino acid
  VARIANT 76: note = Any amino acid
  VARIANT 77: note = Any amino acid
  VARIANT 78: note = Any amino acid
  VARIANT 79: note = Any amino acid
  VARIANT 80: note = Any amino acid
  VARIANT 81: note = Any amino acid
  VARIANT 82: note = Any amino acid
  VARIANT 83: note = Any amino acid
  VARIANT 85: note = Any amino acid
  VARIANT 87: note = Any amino acid
  VARIANT 88: note = Any amino acid
DXXXXXXXXXXXXXXXXXXXXXXXXXXXXXXXXXXXXXXXXXXXXXXXEXXXXXXXXXXXXXXXXXXXXXXXXXXXXXXXXXXKXDXXD

SEQ ID NO: 795620 - protein, 86 aa, unidentified
  VARIANT 2: note = Any amino acid
  VARIANT 3: note = Any amino acid
  VARIANT 4: note = Any amino acid
  VARIANT 5: note = Any amino acid
  VARIANT 6: note = Any amino acid
  VARIANT 7: note = Any amino acid
  VARIANT 8: note = Any amino acid
  VARIANT 9: note = Any amino acid
  VARIANT 10: note = Any amino acid
  VARIANT 11: note = Any amino acid
  VARIANT 12: note = Any amino acid
  VARIANT 13: note = Any amino acid
  VARIANT 14: note = Any amino acid
  VARIANT 15: note = Any amino acid
  VARIANT 16: note = Any amino acid
  VARIANT 17: note = Any amino acid
  VARIANT 18: note = Any amino acid
  VARIANT 19: note = Any amino acid
  VARIANT 20: note = Any amino acid
  VARIANT 21: note = Any amino acid
  VARIANT 22: note = Any amino acid
  VARIANT 23: note = Any amino acid
  VARIANT 24: note = Any amino acid
  VARIANT 25: note = Any amino acid
  VARIANT 26: note = Any amino acid
  VARIANT 27: note = Any amino acid
  VARIANT 28: note = Any amino acid
  VARIANT 29: note = Any amino acid
  VARIANT 30: note = Any amino acid
  VARIANT 31: note = Any amino acid
  VARIANT 32: note = Any amino acid
  VARIANT 33: note = Any amino acid
  VARIANT 34: note = Any amino acid
  VARIANT 35: note = Any amino acid
  VARIANT 36: note = Any amino acid
  VARIANT 37: note = Any amino acid
  VARIANT 38: note = Any amino acid
  VARIANT 39: note = Any amino acid
  VARIANT 40: note = Any amino acid
  VARIANT 41: note = Any amino acid
  VARIANT 42: note = Any amino acid
  VARIANT 43: note = Any amino acid
  VARIANT 44: note = Any amino acid
  VARIANT 45: note = Any amino acid
  VARIANT 47: note = Any amino acid
  VARIANT 48: note = Any amino acid
  VARIANT 49: note = Any amino acid
  VARIANT 50: note = Any amino acid
  VARIANT 51: note = Any amino acid
  VARIANT 52: note = Any amino acid
  VARIANT 53: note = Any amino acid
  VARIANT 54: note = Any amino acid
  VARIANT 55: note = Any amino acid
  VARIANT 56: note = Any amino acid
  VARIANT 57: note = Any amino acid
  VARIANT 58: note = Any amino acid
  VARIANT 59: note = Any amino acid
  VARIANT 60: note = Any amino acid
  VARIANT 61: note = Any amino acid
  VARIANT 62: note = Any amino acid
  VARIANT 63: note = Any amino acid
  VARIANT 64: note = Any amino acid
  VARIANT 65: note = Any amino acid
  VARIANT 66: note = Any amino acid
  VARIANT 67: note = Any amino acid
  VARIANT 68: note = Any amino acid
  VARIANT 69: note = Any amino acid
  VARIANT 70: note = Any amino acid
  VARIANT 71: note = Any amino acid
  VARIANT 72: note = Any amino acid
  VARIANT 73: note = Any amino acid
  VARIANT 74: note = Any amino acid
  VARIANT 75: note = Any amino acid
  VARIANT 76: note = Any amino acid
  VARIANT 77: note = Any amino acid
  VARIANT 78: note = Any amino acid
  VARIANT 79: note = Any amino acid
  VARIANT 80: note = Any amino acid
  VARIANT 82: note = Any amino acid
  VARIANT 84: note = Any amino acid
  VARIANT 85: note = Any amino acid
DXXXXXXXXXXXXXXXXXXXXXXXXXXXXXXXXXXXXXXXXXXXXEXXXXXXXXXXXXXXXXXXXXXXXXXXXXXXXXXXKXDXXD

SEQ ID NO: 795621 - protein, 96 aa, unidentified
  VARIANT 2: note = Any amino acid
  VARIANT 3: note = Any amino acid
  VARIANT 4: note = Any amino acid
  VARIANT 5: note = Any amino acid
  VARIANT 6: note = Any amino acid
  VARIANT 7: note = Any amino acid
  VARIANT 8: note = Any amino acid
  VARIANT 9: note = Any amino acid
  VARIANT 10: note = Any amino acid
  VARIANT 11: note = Any amino acid
  VARIANT 12: note = Any amino acid
  VARIANT 13: note = Any amino acid
  VARIANT 14: note = Any amino acid
  VARIANT 15: note = Any amino acid
  VARIANT 16: note = Any amino acid
  VARIANT 17: note = Any amino acid
  VARIANT 18: note = Any amino acid
  VARIANT 19: note = Any amino acid
  VARIANT 20: note = Any amino acid
  VARIANT 21: note = Any amino acid
  VARIANT 22: note = Any amino acid
  VARIANT 23: note = Any amino acid
  VARIANT 24: note = Any amino acid
  VARIANT 25: note = Any amino acid
  VARIANT 26: note = Any amino acid
  VARIANT 27: note = Any amino acid
  VARIANT 28: note = Any amino acid
  VARIANT 29: note = Any amino acid
  VARIANT 30: note = Any amino acid
  VARIANT 31: note = Any amino acid
  VARIANT 32: note = Any amino acid
  VARIANT 33: note = Any amino acid
  VARIANT 34: note = Any amino acid
  VARIANT 35: note = Any amino acid
  VARIANT 36: note = Any amino acid
  VARIANT 37: note = Any amino acid
  VARIANT 38: note = Any amino acid
  VARIANT 39: note = Any amino acid
  VARIANT 40: note = Any amino acid
  VARIANT 41: note = Any amino acid
  VARIANT 42: note = Any amino acid
  VARIANT 43: note = Any amino acid
  VARIANT 44: note = Any amino acid
  VARIANT 45: note = Any amino acid
  VARIANT 46: note = Any amino acid
  VARIANT 47: note = Any amino acid
  VARIANT 48: note = Any amino acid
  VARIANT 49: note = Any amino acid
  VARIANT 50: note = Any amino acid
  VARIANT 52: note = Any amino acid
  VARIANT 53: note = Any amino acid
  VARIANT 54: note = Any amino acid
  VARIANT 55: note = Any amino acid
  VARIANT 56: note = Any amino acid
  VARIANT 57: note = Any amino acid
  VARIANT 58: note = Any amino acid
  VARIANT 59: note = Any amino acid
  VARIANT 60: note = Any amino acid
  VARIANT 61: note = Any amino acid
  VARIANT 62: note = Any amino acid
  VARIANT 63: note = Any amino acid
  VARIANT 64: note = Any amino acid
  VARIANT 65: note = Any amino acid
  VARIANT 66: note = Any amino acid
  VARIANT 67: note = Any amino acid
  VARIANT 68: note = Any amino acid
  VARIANT 69: note = Any amino acid
  VARIANT 70: note = Any amino acid
  VARIANT 71: note = Any amino acid
  VARIANT 72: note = Any amino acid
  VARIANT 73: note = Any amino acid
  VARIANT 74: note = Any amino acid
  VARIANT 75: note = Any amino acid
  VARIANT 76: note = Any amino acid
  VARIANT 77: note = Any amino acid
  VARIANT 78: note = Any amino acid
  VARIANT 79: note = Any amino acid
  VARIANT 80: note = Any amino acid
  VARIANT 81: note = Any amino acid
  VARIANT 82: note = Any amino acid
  VARIANT 83: note = Any amino acid
  VARIANT 84: note = Any amino acid
  VARIANT 85: note = Any amino acid
  VARIANT 86: note = Any amino acid
  VARIANT 87: note = Any amino acid
  VARIANT 88: note = Any amino acid
  VARIANT 89: note = Any amino acid
  VARIANT 90: note = Any amino acid
  VARIANT 92: note = Any amino acid
  VARIANT 94: note = Any amino acid
  VARIANT 95: note = Any amino acid
DXXXXXXXXXXXXXXXXXXXXXXXXXXXXXXXXXXXXXXXXXXXXXXXXXAXXXXXXXXXXXXXXXXXXXXXXXXXXXXXXXXXXXXXXXKXDXXD

SEQ ID NO: 795622 - protein, 94 aa, unidentified
  VARIANT 2: note = Any amino acid
  VARIANT 3: note = Any amino acid
  VARIANT 4: note = Any amino acid
  VARIANT 5: note = Any amino acid
  VARIANT 6: note = Any amino acid
  VARIANT 7: note = Any amino acid
  VARIANT 8: note = Any amino acid
  VARIANT 9: note = Any amino acid
  VARIANT 10: note = Any amino acid
  VARIANT 11: note = Any amino acid
  VARIANT 12: note = Any amino acid
  VARIANT 13: note = Any amino acid
  VARIANT 14: note = Any amino acid
  VARIANT 15: note = Any amino acid
  VARIANT 16: note = Any amino acid
  VARIANT 17: note = Any amino acid
  VARIANT 18: note = Any amino acid
  VARIANT 19: note = Any amino acid
  VARIANT 20: note = Any amino acid
  VARIANT 21: note = Any amino acid
  VARIANT 22: note = Any amino acid
  VARIANT 23: note = Any amino acid
  VARIANT 24: note = Any amino acid
  VARIANT 25: note = Any amino acid
  VARIANT 26: note = Any amino acid
  VARIANT 27: note = Any amino acid
  VARIANT 28: note = Any amino acid
  VARIANT 29: note = Any amino acid
  VARIANT 30: note = Any amino acid
  VARIANT 31: note = Any amino acid
  VARIANT 32: note = Any amino acid
  VARIANT 33: note = Any amino acid
  VARIANT 34: note = Any amino acid
  VARIANT 35: note = Any amino acid
  VARIANT 36: note = Any amino acid
  VARIANT 37: note = Any amino acid
  VARIANT 38: note = Any amino acid
  VARIANT 39: note = Any amino acid
  VARIANT 40: note = Any amino acid
  VARIANT 41: note = Any amino acid
  VARIANT 42: note = Any amino acid
  VARIANT 43: note = Any amino acid
  VARIANT 44: note = Any amino acid
  VARIANT 45: note = Any amino acid
  VARIANT 46: note = Any amino acid
  VARIANT 47: note = Any amino acid
  VARIANT 48: note = Any amino acid
  VARIANT 49: note = Any amino acid
  VARIANT 50: note = Any amino acid
  VARIANT 51: note = Any amino acid
  VARIANT 52: note = Any amino acid
  VARIANT 54: note = Any amino acid
  VARIANT 55: note = Any amino acid
  VARIANT 56: note = Any amino acid
  VARIANT 57: note = Any amino acid
  VARIANT 58: note = Any amino acid
  VARIANT 59: note = Any amino acid
  VARIANT 60: note = Any amino acid
  VARIANT 61: note = Any amino acid
  VARIANT 62: note = Any amino acid
  VARIANT 63: note = Any amino acid
  VARIANT 64: note = Any amino acid
  VARIANT 65: note = Any amino acid
  VARIANT 66: note = Any amino acid
  VARIANT 67: note = Any amino acid
  VARIANT 68: note = Any amino acid
  VARIANT 69: note = Any amino acid
  VARIANT 70: note = Any amino acid
  VARIANT 71: note = Any amino acid
  VARIANT 72: note = Any amino acid
  VARIANT 73: note = Any amino acid
  VARIANT 74: note = Any amino acid
  VARIANT 75: note = Any amino acid
  VARIANT 76: note = Any amino acid
  VARIANT 77: note = Any amino acid
  VARIANT 78: note = Any amino acid
  VARIANT 79: note = Any amino acid
  VARIANT 80: note = Any amino acid
  VARIANT 81: note = Any amino acid
  VARIANT 82: note = Any amino acid
  VARIANT 83: note = Any amino acid
  VARIANT 84: note = Any amino acid
  VARIANT 85: note = Any amino acid
  VARIANT 86: note = Any amino acid
  VARIANT 87: note = Any amino acid
  VARIANT 88: note = Any amino acid
  VARIANT 90: note = Any amino acid
  VARIANT 92: note = Any amino acid
  VARIANT 93: note = Any amino acid
DXXXXXXXXXXXXXXXXXXXXXXXXXXXXXXXXXXXXXXXXXXXXXXXXXXXEXXXXXXXXXXXXXXXXXXXXXXXXXXXXXXXXXXXKXDXXD

SEQ ID NO: 795623 - protein, 106 aa, unidentified
  VARIANT 2: note = Any amino acid
  VARIANT 3: note = Any amino acid
  VARIANT 4: note = Any amino acid
  VARIANT 5: note = Any amino acid
  VARIANT 6: note = Any amino acid
  VARIANT 7: note = Any amino acid
  VARIANT 8: note = Any amino acid
  VARIANT 9: note = Any amino acid
  VARIANT 10: note = Any amino acid
  VARIANT 11: note = Any amino acid
  VARIANT 12: note = Any amino acid
  VARIANT 13: note = Any amino acid
  VARIANT 14: note = Any amino acid
  VARIANT 15: note = Any amino acid
  VARIANT 16: note = Any amino acid
  VARIANT 17: note = Any amino acid
  VARIANT 18: note = Any amino acid
  VARIANT 19: note = Any amino acid
  VARIANT 20: note = Any amino acid
  VARIANT 21: note = Any amino acid
  VARIANT 22: note = Any amino acid
  VARIANT 23: note = Any amino acid
  VARIANT 24: note = Any amino acid
  VARIANT 25: note = Any amino acid
  VARIANT 26: note = Any amino acid
  VARIANT 27: note = Any amino acid
  VARIANT 28: note = Any amino acid
  VARIANT 29: note = Any amino acid
  VARIANT 30: note = Any amino acid
  VARIANT 31: note = Any amino acid
  VARIANT 32: note = Any amino acid
  VARIANT 33: note = Any amino acid
  VARIANT 34: note = Any amino acid
  VARIANT 35: note = Any amino acid
  VARIANT 36: note = Any amino acid
  VARIANT 37: note = Any amino acid
  VARIANT 38: note = Any amino acid
  VARIANT 39: note = Any amino acid
  VARIANT 40: note = Any amino acid
  VARIANT 41: note = Any amino acid
  VARIANT 42: note = Any amino acid
  VARIANT 43: note = Any amino acid
  VARIANT 44: note = Any amino acid
  VARIANT 45: note = Any amino acid
  VARIANT 46: note = Any amino acid
  VARIANT 47: note = Any amino acid
  VARIANT 48: note = Any amino acid
  VARIANT 49: note = Any amino acid
  VARIANT 50: note = Any amino acid
  VARIANT 51: note = Any amino acid
  VARIANT 53: note = Any amino acid
  VARIANT 54: note = Any amino acid
  VARIANT 55: note = Any amino acid
  VARIANT 56: note = Any amino acid
  VARIANT 57: note = Any amino acid
  VARIANT 58: note = Any amino acid
  VARIANT 59: note = Any amino acid
  VARIANT 60: note = Any amino acid
  VARIANT 61: note = Any amino acid
  VARIANT 62: note = Any amino acid
  VARIANT 63: note = Any amino acid
  VARIANT 64: note = Any amino acid
  VARIANT 65: note = Any amino acid
  VARIANT 66: note = Any amino acid
  VARIANT 67: note = Any amino acid
  VARIANT 68: note = Any amino acid
  VARIANT 69: note = Any amino acid
  VARIANT 70: note = Any amino acid
  VARIANT 71: note = Any amino acid
  VARIANT 72: note = Any amino acid
  VARIANT 73: note = Any amino acid
  VARIANT 74: note = Any amino acid
  VARIANT 75: note = Any amino acid
  VARIANT 76: note = Any amino acid
  VARIANT 77: note = Any amino acid
  VARIANT 78: note = Any amino acid
  VARIANT 79: note = Any amino acid
  VARIANT 80: note = Any amino acid
  VARIANT 81: note = Any amino acid
  VARIANT 82: note = Any amino acid
  VARIANT 83: note = Any amino acid
  VARIANT 84: note = Any amino acid
  VARIANT 85: note = Any amino acid
  VARIANT 86: note = Any amino acid
  VARIANT 87: note = Any amino acid
  VARIANT 88: note = Any amino acid
  VARIANT 89: note = Any amino acid
  VARIANT 90: note = Any amino acid
  VARIANT 91: note = Any amino acid
  VARIANT 92: note = Any amino acid
  VARIANT 93: note = Any amino acid
  VARIANT 94: note = Any amino acid
  VARIANT 95: note = Any amino acid
  VARIANT 96: note = Any amino acid
  VARIANT 97: note = Any amino acid
  VARIANT 98: note = Any amino acid
  VARIANT 99: note = Any amino acid
  VARIANT 100: note = Any amino acid
  VARIANT 102: note = Any amino acid
  VARIANT 104: note = Any amino acid
  VARIANT 105: note = Any amino acid
DXXXXXXXXXXXXXXXXXXXXXXXXXXXXXXXXXXXXXXXXXXXXXXXXXXEXXXXXXXXXXXXXXXXXXXXXXXXXXXXXXXXXXXXXXXXXXXXXXXXKXDXXD

SEQ ID NO: 795624 - protein, 95 aa, unidentified
  VARIANT 2: note = Any amino acid
  VARIANT 3: note = Any amino acid
  VARIANT 4: note = Any amino acid
  VARIANT 5: note = Any amino acid
  VARIANT 6: note = Any amino acid
  VARIANT 7: note = Any amino acid
  VARIANT 8: note = Any amino acid
  VARIANT 9: note = Any amino acid
  VARIANT 10: note = Any amino acid
  VARIANT 11: note = Any amino acid
  VARIANT 12: note = Any amino acid
  VARIANT 13: note = Any amino acid
  VARIANT 14: note = Any amino acid
  VARIANT 15: note = Any amino acid
  VARIANT 16: note = Any amino acid
  VARIANT 17: note = Any amino acid
  VARIANT 18: note = Any amino acid
  VARIANT 19: note = Any amino acid
  VARIANT 20: note = Any amino acid
  VARIANT 21: note = Any amino acid
  VARIANT 22: note = Any amino acid
  VARIANT 23: note = Any amino acid
  VARIANT 24: note = Any amino acid
  VARIANT 25: note = Any amino acid
  VARIANT 26: note = Any amino acid
  VARIANT 27: note = Any amino acid
  VARIANT 28: note = Any amino acid
  VARIANT 29: note = Any amino acid
  VARIANT 30: note = Any amino acid
  VARIANT 31: note = Any amino acid
  VARIANT 32: note = Any amino acid
  VARIANT 33: note = Any amino acid
  VARIANT 34: note = Any amino acid
  VARIANT 35: note = Any amino acid
  VARIANT 36: note = Any amino acid
  VARIANT 37: note = Any amino acid
  VARIANT 38: note = Any amino acid
  VARIANT 39: note = Any amino acid
  VARIANT 40: note = Any amino acid
  VARIANT 41: note = Any amino acid
  VARIANT 42: note = Any amino acid
  VARIANT 43: note = Any amino acid
  VARIANT 44: note = Any amino acid
  VARIANT 45: note = Any amino acid
  VARIANT 46: note = Any amino acid
  VARIANT 47: note = Any amino acid
  VARIANT 48: note = Any amino acid
  VARIANT 49: note = Any amino acid
  VARIANT 50: note = Any amino acid
  VARIANT 51: note = Any amino acid
  VARIANT 53: note = Any amino acid
  VARIANT 54: note = Any amino acid
  VARIANT 55: note = Any amino acid
  VARIANT 56: note = Any amino acid
  VARIANT 57: note = Any amino acid
  VARIANT 58: note = Any amino acid
  VARIANT 59: note = Any amino acid
  VARIANT 60: note = Any amino acid
  VARIANT 61: note = Any amino acid
  VARIANT 62: note = Any amino acid
  VARIANT 63: note = Any amino acid
  VARIANT 64: note = Any amino acid
  VARIANT 65: note = Any amino acid
  VARIANT 66: note = Any amino acid
  VARIANT 67: note = Any amino acid
  VARIANT 68: note = Any amino acid
  VARIANT 69: note = Any amino acid
  VARIANT 70: note = Any amino acid
  VARIANT 71: note = Any amino acid
  VARIANT 72: note = Any amino acid
  VARIANT 73: note = Any amino acid
  VARIANT 74: note = Any amino acid
  VARIANT 75: note = Any amino acid
  VARIANT 76: note = Any amino acid
  VARIANT 77: note = Any amino acid
  VARIANT 78: note = Any amino acid
  VARIANT 79: note = Any amino acid
  VARIANT 80: note = Any amino acid
  VARIANT 81: note = Any amino acid
  VARIANT 82: note = Any amino acid
  VARIANT 83: note = Any amino acid
  VARIANT 84: note = Any amino acid
  VARIANT 85: note = Any amino acid
  VARIANT 86: note = Any amino acid
  VARIANT 87: note = Any amino acid
  VARIANT 88: note = Any amino acid
  VARIANT 89: note = Any amino acid
  VARIANT 91: note = Any amino acid
  VARIANT 93: note = Any amino acid
  VARIANT 94: note = Any amino acid
DXXXXXXXXXXXXXXXXXXXXXXXXXXXXXXXXXXXXXXXXXXXXXXXXXXEXXXXXXXXXXXXXXXXXXXXXXXXXXXXXXXXXXXXXKXDXXD

SEQ ID NO: 795625 - protein, 98 aa, unidentified
  VARIANT 2: note = Any amino acid
  VARIANT 3: note = Any amino acid
  VARIANT 4: note = Any amino acid
  VARIANT 5: note = Any amino acid
  VARIANT 6: note = Any amino acid
  VARIANT 7: note = Any amino acid
  VARIANT 8: note = Any amino acid
  VARIANT 9: note = Any amino acid
  VARIANT 10: note = Any amino acid
  VARIANT 11: note = Any amino acid
  VARIANT 12: note = Any amino acid
  VARIANT 13: note = Any amino acid
  VARIANT 14: note = Any amino acid
  VARIANT 15: note = Any amino acid
  VARIANT 16: note = Any amino acid
  VARIANT 17: note = Any amino acid
  VARIANT 18: note = Any amino acid
  VARIANT 19: note = Any amino acid
  VARIANT 20: note = Any amino acid
  VARIANT 21: note = Any amino acid
  VARIANT 22: note = Any amino acid
  VARIANT 23: note = Any amino acid
  VARIANT 24: note = Any amino acid
  VARIANT 25: note = Any amino acid
  VARIANT 26: note = Any amino acid
  VARIANT 27: note = Any amino acid
  VARIANT 28: note = Any amino acid
  VARIANT 29: note = Any amino acid
  VARIANT 30: note = Any amino acid
  VARIANT 31: note = Any amino acid
  VARIANT 32: note = Any amino acid
  VARIANT 33: note = Any amino acid
  VARIANT 34: note = Any amino acid
  VARIANT 35: note = Any amino acid
  VARIANT 36: note = Any amino acid
  VARIANT 37: note = Any amino acid
  VARIANT 38: note = Any amino acid
  VARIANT 39: note = Any amino acid
  VARIANT 40: note = Any amino acid
  VARIANT 41: note = Any amino acid
  VARIANT 42: note = Any amino acid
  VARIANT 43: note = Any amino acid
  VARIANT 44: note = Any amino acid
  VARIANT 45: note = Any amino acid
  VARIANT 46: note = Any amino acid
  VARIANT 47: note = Any amino acid
  VARIANT 48: note = Any amino acid
  VARIANT 49: note = Any amino acid
  VARIANT 50: note = Any amino acid
  VARIANT 51: note = Any amino acid
  VARIANT 52: note = Any amino acid
  VARIANT 53: note = Any amino acid
  VARIANT 54: note = Any amino acid
  VARIANT 56: note = Any amino acid
  VARIANT 57: note = Any amino acid
  VARIANT 58: note = Any amino acid
  VARIANT 59: note = Any amino acid
  VARIANT 60: note = Any amino acid
  VARIANT 61: note = Any amino acid
  VARIANT 62: note = Any amino acid
  VARIANT 63: note = Any amino acid
  VARIANT 64: note = Any amino acid
  VARIANT 65: note = Any amino acid
  VARIANT 66: note = Any amino acid
  VARIANT 67: note = Any amino acid
  VARIANT 68: note = Any amino acid
  VARIANT 69: note = Any amino acid
  VARIANT 70: note = Any amino acid
  VARIANT 71: note = Any amino acid
  VARIANT 72: note = Any amino acid
  VARIANT 73: note = Any amino acid
  VARIANT 74: note = Any amino acid
  VARIANT 75: note = Any amino acid
  VARIANT 76: note = Any amino acid
  VARIANT 77: note = Any amino acid
  VARIANT 78: note = Any amino acid
  VARIANT 79: note = Any amino acid
  VARIANT 80: note = Any amino acid
  VARIANT 81: note = Any amino acid
  VARIANT 82: note = Any amino acid
  VARIANT 83: note = Any amino acid
  VARIANT 84: note = Any amino acid
  VARIANT 85: note = Any amino acid
  VARIANT 86: note = Any amino acid
  VARIANT 87: note = Any amino acid
  VARIANT 88: note = Any amino acid
  VARIANT 89: note = Any amino acid
  VARIANT 90: note = Any amino acid
  VARIANT 91: note = Any amino acid
  VARIANT 92: note = Any amino acid
  VARIANT 94: note = Any amino acid
  VARIANT 96: note = Any amino acid
  VARIANT 97: note = Any amino acid
DXXXXXXXXXXXXXXXXXXXXXXXXXXXXXXXXXXXXXXXXXXXXXXXXXXXXXEXXXXXXXXXXXXXXXXXXXXXXXXXXXXXXXXXXXXXKXDXXD

SEQ ID NO: 795626 - protein, 97 aa, unidentified
  VARIANT 2: note = Any amino acid
  VARIANT 3: note = Any amino acid
  VARIANT 4: note = Any amino acid
  VARIANT 5: note = Any amino acid
  VARIANT 6: note = Any amino acid
  VARIANT 7: note = Any amino acid
  VARIANT 8: note = Any amino acid
  VARIANT 9: note = Any amino acid
  VARIANT 10: note = Any amino acid
  VARIANT 11: note = Any amino acid
  VARIANT 12: note = Any amino acid
  VARIANT 13: note = Any amino acid
  VARIANT 14: note = Any amino acid
  VARIANT 15: note = Any amino acid
  VARIANT 16: note = Any amino acid
  VARIANT 17: note = Any amino acid
  VARIANT 18: note = Any amino acid
  VARIANT 19: note = Any amino acid
  VARIANT 20: note = Any amino acid
  VARIANT 21: note = Any amino acid
  VARIANT 22: note = Any amino acid
  VARIANT 23: note = Any amino acid
  VARIANT 24: note = Any amino acid
  VARIANT 25: note = Any amino acid
  VARIANT 26: note = Any amino acid
  VARIANT 27: note = Any amino acid
  VARIANT 28: note = Any amino acid
  VARIANT 29: note = Any amino acid
  VARIANT 30: note = Any amino acid
  VARIANT 31: note = Any amino acid
  VARIANT 32: note = Any amino acid
  VARIANT 33: note = Any amino acid
  VARIANT 34: note = Any amino acid
  VARIANT 35: note = Any amino acid
  VARIANT 36: note = Any amino acid
  VARIANT 37: note = Any amino acid
  VARIANT 38: note = Any amino acid
  VARIANT 39: note = Any amino acid
  VARIANT 40: note = Any amino acid
  VARIANT 41: note = Any amino acid
  VARIANT 42: note = Any amino acid
  VARIANT 43: note = Any amino acid
  VARIANT 44: note = Any amino acid
  VARIANT 45: note = Any amino acid
  VARIANT 46: note = Any amino acid
  VARIANT 47: note = Any amino acid
  VARIANT 48: note = Any amino acid
  VARIANT 49: note = Any amino acid
  VARIANT 50: note = Any amino acid
  VARIANT 52: note = Any amino acid
  VARIANT 53: note = Any amino acid
  VARIANT 54: note = Any amino acid
  VARIANT 55: note = Any amino acid
  VARIANT 56: note = Any amino acid
  VARIANT 57: note = Any amino acid
  VARIANT 58: note = Any amino acid
  VARIANT 59: note = Any amino acid
  VARIANT 60: note = Any amino acid
  VARIANT 61: note = Any amino acid
  VARIANT 62: note = Any amino acid
  VARIANT 63: note = Any amino acid
  VARIANT 64: note = Any amino acid
  VARIANT 65: note = Any amino acid
  VARIANT 66: note = Any amino acid
  VARIANT 67: note = Any amino acid
  VARIANT 68: note = Any amino acid
  VARIANT 69: note = Any amino acid
  VARIANT 70: note = Any amino acid
  VARIANT 71: note = Any amino acid
  VARIANT 72: note = Any amino acid
  VARIANT 73: note = Any amino acid
  VARIANT 74: note = Any amino acid
  VARIANT 75: note = Any amino acid
  VARIANT 76: note = Any amino acid
  VARIANT 77: note = Any amino acid
  VARIANT 78: note = Any amino acid
  VARIANT 79: note = Any amino acid
  VARIANT 80: note = Any amino acid
  VARIANT 81: note = Any amino acid
  VARIANT 82: note = Any amino acid
  VARIANT 83: note = Any amino acid
  VARIANT 84: note = Any amino acid
  VARIANT 85: note = Any amino acid
  VARIANT 86: note = Any amino acid
  VARIANT 87: note = Any amino acid
  VARIANT 88: note = Any amino acid
  VARIANT 89: note = Any amino acid
  VARIANT 90: note = Any amino acid
  VARIANT 91: note = Any amino acid
  VARIANT 93: note = Any amino acid
  VARIANT 95: note = Any amino acid
  VARIANT 96: note = Any amino acid
DXXXXXXXXXXXXXXXXXXXXXXXXXXXXXXXXXXXXXXXXXXXXXXXXXEXXXXXXXXXXXXXXXXXXXXXXXXXXXXXXXXXXXXXXXXKXDXXD

SEQ ID NO: 795627 - protein, 100 aa, unidentified
  VARIANT 2: note = Any amino acid
  VARIANT 3: note = Any amino acid
  VARIANT 4: note = Any amino acid
  VARIANT 5: note = Any amino acid
  VARIANT 6: note = Any amino acid
  VARIANT 7: note = Any amino acid
  VARIANT 8: note = Any amino acid
  VARIANT 9: note = Any amino acid
  VARIANT 10: note = Any amino acid
  VARIANT 11: note = Any amino acid
  VARIANT 12: note = Any amino acid
  VARIANT 13: note = Any amino acid
  VARIANT 14: note = Any amino acid
  VARIANT 15: note = Any amino acid
  VARIANT 16: note = Any amino acid
  VARIANT 17: note = Any amino acid
  VARIANT 18: note = Any amino acid
  VARIANT 19: note = Any amino acid
  VARIANT 20: note = Any amino acid
  VARIANT 21: note = Any amino acid
  VARIANT 22: note = Any amino acid
  VARIANT 23: note = Any amino acid
  VARIANT 24: note = Any amino acid
  VARIANT 25: note = Any amino acid
  VARIANT 26: note = Any amino acid
  VARIANT 27: note = Any amino acid
  VARIANT 28: note = Any amino acid
  VARIANT 29: note = Any amino acid
  VARIANT 30: note = Any amino acid
  VARIANT 31: note = Any amino acid
  VARIANT 32: note = Any amino acid
  VARIANT 33: note = Any amino acid
  VARIANT 34: note = Any amino acid
  VARIANT 35: note = Any amino acid
  VARIANT 36: note = Any amino acid
  VARIANT 37: note = Any amino acid
  VARIANT 38: note = Any amino acid
  VARIANT 39: note = Any amino acid
  VARIANT 40: note = Any amino acid
  VARIANT 41: note = Any amino acid
  VARIANT 42: note = Any amino acid
  VARIANT 43: note = Any amino acid
  VARIANT 44: note = Any amino acid
  VARIANT 45: note = Any amino acid
  VARIANT 46: note = Any amino acid
  VARIANT 47: note = Any amino acid
  VARIANT 48: note = Any amino acid
  VARIANT 49: note = Any amino acid
  VARIANT 50: note = Any amino acid
  VARIANT 51: note = Any amino acid
  VARIANT 52: note = Any amino acid
  VARIANT 53: note = Any amino acid
  VARIANT 54: note = Any amino acid
  VARIANT 55: note = Any amino acid
  VARIANT 56: note = Any amino acid
  VARIANT 58: note = Any amino acid
  VARIANT 59: note = Any amino acid
  VARIANT 60: note = Any amino acid
  VARIANT 61: note = Any amino acid
  VARIANT 62: note = Any amino acid
  VARIANT 63: note = Any amino acid
  VARIANT 64: note = Any amino acid
  VARIANT 65: note = Any amino acid
  VARIANT 66: note = Any amino acid
  VARIANT 67: note = Any amino acid
  VARIANT 68: note = Any amino acid
  VARIANT 69: note = Any amino acid
  VARIANT 70: note = Any amino acid
  VARIANT 71: note = Any amino acid
  VARIANT 72: note = Any amino acid
  VARIANT 73: note = Any amino acid
  VARIANT 74: note = Any amino acid
  VARIANT 75: note = Any amino acid
  VARIANT 76: note = Any amino acid
  VARIANT 77: note = Any amino acid
  VARIANT 78: note = Any amino acid
  VARIANT 79: note = Any amino acid
  VARIANT 80: note = Any amino acid
  VARIANT 81: note = Any amino acid
  VARIANT 82: note = Any amino acid
  VARIANT 83: note = Any amino acid
  VARIANT 84: note = Any amino acid
  VARIANT 85: note = Any amino acid
  VARIANT 86: note = Any amino acid
  VARIANT 87: note = Any amino acid
  VARIANT 88: note = Any amino acid
  VARIANT 89: note = Any amino acid
  VARIANT 90: note = Any amino acid
  VARIANT 91: note = Any amino acid
  VARIANT 92: note = Any amino acid
  VARIANT 93: note = Any amino acid
  VARIANT 94: note = Any amino acid
  VARIANT 96: note = Any amino acid
  VARIANT 98: note = Any amino acid
  VARIANT 99: note = Any amino acid
DXXXXXXXXXXXXXXXXXXXXXXXXXXXXXXXXXXXXXXXXXXXXXXXXXXXXXXXEXXXXXXXXXXXXXXXXXXXXXXXXXXXXXXXXXXXXXKXDXXD

SEQ ID NO: 795628 - protein, 98 aa, unidentified
  VARIANT 2: note = Any amino acid
  VARIANT 3: note = Any amino acid
  VARIANT 4: note = Any amino acid
  VARIANT 5: note = Any amino acid
  VARIANT 6: note = Any amino acid
  VARIANT 7: note = Any amino acid
  VARIANT 8: note = Any amino acid
  VARIANT 9: note = Any amino acid
  VARIANT 10: note = Any amino acid
  VARIANT 11: note = Any amino acid
  VARIANT 12: note = Any amino acid
  VARIANT 13: note = Any amino acid
  VARIANT 14: note = Any amino acid
  VARIANT 15: note = Any amino acid
  VARIANT 16: note = Any amino acid
  VARIANT 17: note = Any amino acid
  VARIANT 18: note = Any amino acid
  VARIANT 19: note = Any amino acid
  VARIANT 20: note = Any amino acid
  VARIANT 21: note = Any amino acid
  VARIANT 22: note = Any amino acid
  VARIANT 23: note = Any amino acid
  VARIANT 24: note = Any amino acid
  VARIANT 25: note = Any amino acid
  VARIANT 26: note = Any amino acid
  VARIANT 27: note = Any amino acid
  VARIANT 28: note = Any amino acid
  VARIANT 29: note = Any amino acid
  VARIANT 30: note = Any amino acid
  VARIANT 31: note = Any amino acid
  VARIANT 32: note = Any amino acid
  VARIANT 33: note = Any amino acid
  VARIANT 34: note = Any amino acid
  VARIANT 35: note = Any amino acid
  VARIANT 36: note = Any amino acid
  VARIANT 37: note = Any amino acid
  VARIANT 38: note = Any amino acid
  VARIANT 39: note = Any amino acid
  VARIANT 40: note = Any amino acid
  VARIANT 41: note = Any amino acid
  VARIANT 42: note = Any amino acid
  VARIANT 43: note = Any amino acid
  VARIANT 44: note = Any amino acid
  VARIANT 45: note = Any amino acid
  VARIANT 46: note = Any amino acid
  VARIANT 47: note = Any amino acid
  VARIANT 48: note = Any amino acid
  VARIANT 49: note = Any amino acid
  VARIANT 50: note = Any amino acid
  VARIANT 51: note = Any amino acid
  VARIANT 53: note = Any amino acid
  VARIANT 54: note = Any amino acid
  VARIANT 55: note = Any amino acid
  VARIANT 56: note = Any amino acid
  VARIANT 57: note = Any amino acid
  VARIANT 58: note = Any amino acid
  VARIANT 59: note = Any amino acid
  VARIANT 60: note = Any amino acid
  VARIANT 61: note = Any amino acid
  VARIANT 62: note = Any amino acid
  VARIANT 63: note = Any amino acid
  VARIANT 64: note = Any amino acid
  VARIANT 65: note = Any amino acid
  VARIANT 66: note = Any amino acid
  VARIANT 67: note = Any amino acid
  VARIANT 68: note = Any amino acid
  VARIANT 69: note = Any amino acid
  VARIANT 70: note = Any amino acid
  VARIANT 71: note = Any amino acid
  VARIANT 72: note = Any amino acid
  VARIANT 73: note = Any amino acid
  VARIANT 74: note = Any amino acid
  VARIANT 75: note = Any amino acid
  VARIANT 76: note = Any amino acid
  VARIANT 77: note = Any amino acid
  VARIANT 78: note = Any amino acid
  VARIANT 79: note = Any amino acid
  VARIANT 80: note = Any amino acid
  VARIANT 81: note = Any amino acid
  VARIANT 82: note = Any amino acid
  VARIANT 83: note = Any amino acid
  VARIANT 84: note = Any amino acid
  VARIANT 85: note = Any amino acid
  VARIANT 86: note = Any amino acid
  VARIANT 87: note = Any amino acid
  VARIANT 88: note = Any amino acid
  VARIANT 89: note = Any amino acid
  VARIANT 90: note = Any amino acid
  VARIANT 91: note = Any amino acid
  VARIANT 92: note = Any amino acid
  VARIANT 94: note = Any amino acid
  VARIANT 96: note = Any amino acid
  VARIANT 97: note = Any amino acid
DXXXXXXXXXXXXXXXXXXXXXXXXXXXXXXXXXXXXXXXXXXXXXXXXXXEXXXXXXXXXXXXXXXXXXXXXXXXXXXXXXXXXXXXXXXXKXDXXD

SEQ ID NO: 795629 - protein, 94 aa, unidentified
  VARIANT 2: note = Any amino acid
  VARIANT 3: note = Any amino acid
  VARIANT 4: note = Any amino acid
  VARIANT 5: note = Any amino acid
  VARIANT 6: note = Any amino acid
  VARIANT 7: note = Any amino acid
  VARIANT 8: note = Any amino acid
  VARIANT 9: note = Any amino acid
  VARIANT 10: note = Any amino acid
  VARIANT 11: note = Any amino acid
  VARIANT 12: note = Any amino acid
  VARIANT 13: note = Any amino acid
  VARIANT 14: note = Any amino acid
  VARIANT 15: note = Any amino acid
  VARIANT 16: note = Any amino acid
  VARIANT 17: note = Any amino acid
  VARIANT 18: note = Any amino acid
  VARIANT 19: note = Any amino acid
  VARIANT 20: note = Any amino acid
  VARIANT 21: note = Any amino acid
  VARIANT 22: note = Any amino acid
  VARIANT 23: note = Any amino acid
  VARIANT 24: note = Any amino acid
  VARIANT 25: note = Any amino acid
  VARIANT 26: note = Any amino acid
  VARIANT 27: note = Any amino acid
  VARIANT 28: note = Any amino acid
  VARIANT 29: note = Any amino acid
  VARIANT 30: note = Any amino acid
  VARIANT 31: note = Any amino acid
  VARIANT 32: note = Any amino acid
  VARIANT 33: note = Any amino acid
  VARIANT 34: note = Any amino acid
  VARIANT 35: note = Any amino acid
  VARIANT 36: note = Any amino acid
  VARIANT 37: note = Any amino acid
  VARIANT 38: note = Any amino acid
  VARIANT 39: note = Any amino acid
  VARIANT 40: note = Any amino acid
  VARIANT 41: note = Any amino acid
  VARIANT 42: note = Any amino acid
  VARIANT 43: note = Any amino acid
  VARIANT 44: note = Any amino acid
  VARIANT 45: note = Any amino acid
  VARIANT 46: note = Any amino acid
  VARIANT 47: note = Any amino acid
  VARIANT 48: note = Any amino acid
  VARIANT 49: note = Any amino acid
  VARIANT 50: note = Any amino acid
  VARIANT 52: note = Any amino acid
  VARIANT 53: note = Any amino acid
  VARIANT 54: note = Any amino acid
  VARIANT 55: note = Any amino acid
  VARIANT 56: note = Any amino acid
  VARIANT 57: note = Any amino acid
  VARIANT 58: note = Any amino acid
  VARIANT 59: note = Any amino acid
  VARIANT 60: note = Any amino acid
  VARIANT 61: note = Any amino acid
  VARIANT 62: note = Any amino acid
  VARIANT 63: note = Any amino acid
  VARIANT 64: note = Any amino acid
  VARIANT 65: note = Any amino acid
  VARIANT 66: note = Any amino acid
  VARIANT 67: note = Any amino acid
  VARIANT 68: note = Any amino acid
  VARIANT 69: note = Any amino acid
  VARIANT 70: note = Any amino acid
  VARIANT 71: note = Any amino acid
  VARIANT 72: note = Any amino acid
  VARIANT 73: note = Any amino acid
  VARIANT 74: note = Any amino acid
  VARIANT 75: note = Any amino acid
  VARIANT 76: note = Any amino acid
  VARIANT 77: note = Any amino acid
  VARIANT 78: note = Any amino acid
  VARIANT 79: note = Any amino acid
  VARIANT 80: note = Any amino acid
  VARIANT 81: note = Any amino acid
  VARIANT 82: note = Any amino acid
  VARIANT 83: note = Any amino acid
  VARIANT 84: note = Any amino acid
  VARIANT 85: note = Any amino acid
  VARIANT 86: note = Any amino acid
  VARIANT 87: note = Any amino acid
  VARIANT 88: note = Any amino acid
  VARIANT 90: note = Any amino acid
  VARIANT 92: note = Any amino acid
  VARIANT 93: note = Any amino acid
DXXXXXXXXXXXXXXXXXXXXXXXXXXXXXXXXXXXXXXXXXXXXXXXXXEXXXXXXXXXXXXXXXXXXXXXXXXXXXXXXXXXXXXXKXDXXD

SEQ ID NO: 795630 - protein, 89 aa, unidentified
  VARIANT 2: note = Any amino acid
  VARIANT 3: note = Any amino acid
  VARIANT 4: note = Any amino acid
  VARIANT 5: note = Any amino acid
  VARIANT 6: note = Any amino acid
  VARIANT 7: note = Any amino acid
  VARIANT 8: note = Any amino acid
  VARIANT 9: note = Any amino acid
  VARIANT 10: note = Any amino acid
  VARIANT 11: note = Any amino acid
  VARIANT 12: note = Any amino acid
  VARIANT 13: note = Any amino acid
  VARIANT 14: note = Any amino acid
  VARIANT 15: note = Any amino acid
  VARIANT 16: note = Any amino acid
  VARIANT 17: note = Any amino acid
  VARIANT 18: note = Any amino acid
  VARIANT 19: note = Any amino acid
  VARIANT 20: note = Any amino acid
  VARIANT 21: note = Any amino acid
  VARIANT 22: note = Any amino acid
  VARIANT 23: note = Any amino acid
  VARIANT 24: note = Any amino acid
  VARIANT 25: note = Any amino acid
  VARIANT 26: note = Any amino acid
  VARIANT 27: note = Any amino acid
  VARIANT 28: note = Any amino acid
  VARIANT 29: note = Any amino acid
  VARIANT 30: note = Any amino acid
  VARIANT 31: note = Any amino acid
  VARIANT 32: note = Any amino acid
  VARIANT 33: note = Any amino acid
  VARIANT 34: note = Any amino acid
  VARIANT 35: note = Any amino acid
  VARIANT 36: note = Any amino acid
  VARIANT 37: note = Any amino acid
  VARIANT 38: note = Any amino acid
  VARIANT 39: note = Any amino acid
  VARIANT 40: note = Any amino acid
  VARIANT 41: note = Any amino acid
  VARIANT 42: note = Any amino acid
  VARIANT 43: note = Any amino acid
  VARIANT 44: note = Any amino acid
  VARIANT 46: note = Any amino acid
  VARIANT 47: note = Any amino acid
  VARIANT 48: note = Any amino acid
  VARIANT 49: note = Any amino acid
  VARIANT 50: note = Any amino acid
  VARIANT 51: note = Any amino acid
  VARIANT 52: note = Any amino acid
  VARIANT 53: note = Any amino acid
  VARIANT 54: note = Any amino acid
  VARIANT 55: note = Any amino acid
  VARIANT 56: note = Any amino acid
  VARIANT 57: note = Any amino acid
  VARIANT 58: note = Any amino acid
  VARIANT 59: note = Any amino acid
  VARIANT 60: note = Any amino acid
  VARIANT 61: note = Any amino acid
  VARIANT 62: note = Any amino acid
  VARIANT 63: note = Any amino acid
  VARIANT 64: note = Any amino acid
  VARIANT 65: note = Any amino acid
  VARIANT 66: note = Any amino acid
  VARIANT 67: note = Any amino acid
  VARIANT 68: note = Any amino acid
  VARIANT 69: note = Any amino acid
  VARIANT 70: note = Any amino acid
  VARIANT 71: note = Any amino acid
  VARIANT 72: note = Any amino acid
  VARIANT 73: note = Any amino acid
  VARIANT 74: note = Any amino acid
  VARIANT 75: note = Any amino acid
  VARIANT 76: note = Any amino acid
  VARIANT 77: note = Any amino acid
  VARIANT 78: note = Any amino acid
  VARIANT 79: note = Any amino acid
  VARIANT 80: note = Any amino acid
  VARIANT 81: note = Any amino acid
  VARIANT 82: note = Any amino acid
  VARIANT 83: note = Any amino acid
  VARIANT 85: note = Any amino acid
  VARIANT 87: note = Any amino acid
  VARIANT 88: note = Any amino acid
DXXXXXXXXXXXXXXXXXXXXXXXXXXXXXXXXXXXXXXXXXXXEXXXXXXXXXXXXXXXXXXXXXXXXXXXXXXXXXXXXXXKXDXXD

SEQ ID NO: 795631 - protein, 90 aa, unidentified
  VARIANT 2: note = Any amino acid
  VARIANT 3: note = Any amino acid
  VARIANT 4: note = Any amino acid
  VARIANT 5: note = Any amino acid
  VARIANT 6: note = Any amino acid
  VARIANT 7: note = Any amino acid
  VARIANT 8: note = Any amino acid
  VARIANT 9: note = Any amino acid
  VARIANT 10: note = Any amino acid
  VARIANT 11: note = Any amino acid
  VARIANT 12: note = Any amino acid
  VARIANT 13: note = Any amino acid
  VARIANT 14: note = Any amino acid
  VARIANT 15: note = Any amino acid
  VARIANT 16: note = Any amino acid
  VARIANT 17: note = Any amino acid
  VARIANT 18: note = Any amino acid
  VARIANT 19: note = Any amino acid
  VARIANT 20: note = Any amino acid
  VARIANT 21: note = Any amino acid
  VARIANT 22: note = Any amino acid
  VARIANT 23: note = Any amino acid
  VARIANT 24: note = Any amino acid
  VARIANT 25: note = Any amino acid
  VARIANT 26: note = Any amino acid
  VARIANT 27: note = Any amino acid
  VARIANT 28: note = Any amino acid
  VARIANT 29: note = Any amino acid
  VARIANT 30: note = Any amino acid
  VARIANT 31: note = Any amino acid
  VARIANT 32: note = Any amino acid
  VARIANT 33: note = Any amino acid
  VARIANT 34: note = Any amino acid
  VARIANT 35: note = Any amino acid
  VARIANT 36: note = Any amino acid
  VARIANT 37: note = Any amino acid
  VARIANT 38: note = Any amino acid
  VARIANT 39: note = Any amino acid
  VARIANT 40: note = Any amino acid
  VARIANT 41: note = Any amino acid
  VARIANT 42: note = Any amino acid
  VARIANT 43: note = Any amino acid
  VARIANT 44: note = Any amino acid
  VARIANT 45: note = Any amino acid
  VARIANT 46: note = Any amino acid
  VARIANT 47: note = Any amino acid
  VARIANT 48: note = Any amino acid
  VARIANT 49: note = Any amino acid
  VARIANT 51: note = Any amino acid
  VARIANT 52: note = Any amino acid
  VARIANT 53: note = Any amino acid
  VARIANT 54: note = Any amino acid
  VARIANT 55: note = Any amino acid
  VARIANT 56: note = Any amino acid
  VARIANT 57: note = Any amino acid
  VARIANT 58: note = Any amino acid
  VARIANT 59: note = Any amino acid
  VARIANT 60: note = Any amino acid
  VARIANT 61: note = Any amino acid
  VARIANT 62: note = Any amino acid
  VARIANT 63: note = Any amino acid
  VARIANT 64: note = Any amino acid
  VARIANT 65: note = Any amino acid
  VARIANT 66: note = Any amino acid
  VARIANT 67: note = Any amino acid
  VARIANT 68: note = Any amino acid
  VARIANT 69: note = Any amino acid
  VARIANT 70: note = Any amino acid
  VARIANT 71: note = Any amino acid
  VARIANT 72: note = Any amino acid
  VARIANT 73: note = Any amino acid
  VARIANT 74: note = Any amino acid
  VARIANT 75: note = Any amino acid
  VARIANT 76: note = Any amino acid
  VARIANT 77: note = Any amino acid
  VARIANT 78: note = Any amino acid
  VARIANT 79: note = Any amino acid
  VARIANT 80: note = Any amino acid
  VARIANT 81: note = Any amino acid
  VARIANT 82: note = Any amino acid
  VARIANT 83: note = Any amino acid
  VARIANT 84: note = Any amino acid
  VARIANT 86: note = Any amino acid
  VARIANT 88: note = Any amino acid
  VARIANT 89: note = Any amino acid
DXXXXXXXXXXXXXXXXXXXXXXXXXXXXXXXXXXXXXXXXXXXXXXXXEXXXXXXXXXXXXXXXXXXXXXXXXXXXXXXXXXXKXDXXD

SEQ ID NO: 795632 - protein, 101 aa, unidentified
  VARIANT 2: note = Any amino acid
  VARIANT 3: note = Any amino acid
  VARIANT 4: note = Any amino acid
  VARIANT 5: note = Any amino acid
  VARIANT 6: note = Any amino acid
  VARIANT 7: note = Any amino acid
  VARIANT 8: note = Any amino acid
  VARIANT 9: note = Any amino acid
  VARIANT 10: note = Any amino acid
  VARIANT 11: note = Any amino acid
  VARIANT 12: note = Any amino acid
  VARIANT 13: note = Any amino acid
  VARIANT 14: note = Any amino acid
  VARIANT 15: note = Any amino acid
  VARIANT 16: note = Any amino acid
  VARIANT 17: note = Any amino acid
  VARIANT 18: note = Any amino acid
  VARIANT 19: note = Any amino acid
  VARIANT 20: note = Any amino acid
  VARIANT 21: note = Any amino acid
  VARIANT 22: note = Any amino acid
  VARIANT 23: note = Any amino acid
  VARIANT 24: note = Any amino acid
  VARIANT 25: note = Any amino acid
  VARIANT 26: note = Any amino acid
  VARIANT 27: note = Any amino acid
  VARIANT 28: note = Any amino acid
  VARIANT 29: note = Any amino acid
  VARIANT 30: note = Any amino acid
  VARIANT 31: note = Any amino acid
  VARIANT 32: note = Any amino acid
  VARIANT 33: note = Any amino acid
  VARIANT 34: note = Any amino acid
  VARIANT 35: note = Any amino acid
  VARIANT 36: note = Any amino acid
  VARIANT 37: note = Any amino acid
  VARIANT 38: note = Any amino acid
  VARIANT 39: note = Any amino acid
  VARIANT 40: note = Any amino acid
  VARIANT 41: note = Any amino acid
  VARIANT 42: note = Any amino acid
  VARIANT 43: note = Any amino acid
  VARIANT 44: note = Any amino acid
  VARIANT 45: note = Any amino acid
  VARIANT 46: note = Any amino acid
  VARIANT 47: note = Any amino acid
  VARIANT 48: note = Any amino acid
  VARIANT 49: note = Any amino acid
  VARIANT 50: note = Any amino acid
  VARIANT 51: note = Any amino acid
  VARIANT 52: note = Any amino acid
  VARIANT 53: note = Any amino acid
  VARIANT 54: note = Any amino acid
  VARIANT 55: note = Any amino acid
  VARIANT 56: note = Any amino acid
  VARIANT 57: note = Any amino acid
  VARIANT 59: note = Any amino acid
  VARIANT 60: note = Any amino acid
  VARIANT 61: note = Any amino acid
  VARIANT 62: note = Any amino acid
  VARIANT 63: note = Any amino acid
  VARIANT 64: note = Any amino acid
  VARIANT 65: note = Any amino acid
  VARIANT 66: note = Any amino acid
  VARIANT 67: note = Any amino acid
  VARIANT 68: note = Any amino acid
  VARIANT 69: note = Any amino acid
  VARIANT 70: note = Any amino acid
  VARIANT 71: note = Any amino acid
  VARIANT 72: note = Any amino acid
  VARIANT 73: note = Any amino acid
  VARIANT 74: note = Any amino acid
  VARIANT 75: note = Any amino acid
  VARIANT 76: note = Any amino acid
  VARIANT 77: note = Any amino acid
  VARIANT 78: note = Any amino acid
  VARIANT 79: note = Any amino acid
  VARIANT 80: note = Any amino acid
  VARIANT 81: note = Any amino acid
  VARIANT 82: note = Any amino acid
  VARIANT 83: note = Any amino acid
  VARIANT 84: note = Any amino acid
  VARIANT 85: note = Any amino acid
  VARIANT 86: note = Any amino acid
  VARIANT 87: note = Any amino acid
  VARIANT 88: note = Any amino acid
  VARIANT 89: note = Any amino acid
  VARIANT 90: note = Any amino acid
  VARIANT 91: note = Any amino acid
  VARIANT 92: note = Any amino acid
  VARIANT 93: note = Any amino acid
  VARIANT 94: note = Any amino acid
  VARIANT 95: note = Any amino acid
  VARIANT 97: note = Any amino acid
  VARIANT 99: note = Any amino acid
  VARIANT 100: note = Any amino acid
DXXXXXXXXXXXXXXXXXXXXXXXXXXXXXXXXXXXXXXXXXXXXXXXXXXXXXXXXEXXXXXXXXXXXXXXXXXXXXXXXXXXXXXXXXXXXXXSXDXXD

SEQ ID NO: 795633 - protein, 94 aa, unidentified
  VARIANT 2: note = Any amino acid
  VARIANT 3: note = Any amino acid
  VARIANT 4: note = Any amino acid
  VARIANT 5: note = Any amino acid
  VARIANT 6: note = Any amino acid
  VARIANT 7: note = Any amino acid
  VARIANT 8: note = Any amino acid
  VARIANT 9: note = Any amino acid
  VARIANT 10: note = Any amino acid
  VARIANT 11: note = Any amino acid
  VARIANT 12: note = Any amino acid
  VARIANT 13: note = Any amino acid
  VARIANT 14: note = Any amino acid
  VARIANT 15: note = Any amino acid
  VARIANT 16: note = Any amino acid
  VARIANT 17: note = Any amino acid
  VARIANT 18: note = Any amino acid
  VARIANT 19: note = Any amino acid
  VARIANT 20: note = Any amino acid
  VARIANT 21: note = Any amino acid
  VARIANT 22: note = Any amino acid
  VARIANT 23: note = Any amino acid
  VARIANT 24: note = Any amino acid
  VARIANT 25: note = Any amino acid
  VARIANT 26: note = Any amino acid
  VARIANT 27: note = Any amino acid
  VARIANT 28: note = Any amino acid
  VARIANT 29: note = Any amino acid
  VARIANT 30: note = Any amino acid
  VARIANT 31: note = Any amino acid
  VARIANT 32: note = Any amino acid
  VARIANT 33: note = Any amino acid
  VARIANT 34: note = Any amino acid
  VARIANT 35: note = Any amino acid
  VARIANT 36: note = Any amino acid
  VARIANT 37: note = Any amino acid
  VARIANT 38: note = Any amino acid
  VARIANT 39: note = Any amino acid
  VARIANT 40: note = Any amino acid
  VARIANT 41: note = Any amino acid
  VARIANT 42: note = Any amino acid
  VARIANT 43: note = Any amino acid
  VARIANT 44: note = Any amino acid
  VARIANT 45: note = Any amino acid
  VARIANT 46: note = Any amino acid
  VARIANT 47: note = Any amino acid
  VARIANT 48: note = Any amino acid
  VARIANT 49: note = Any amino acid
  VARIANT 51: note = Any amino acid
  VARIANT 52: note = Any amino acid
  VARIANT 53: note = Any amino acid
  VARIANT 54: note = Any amino acid
  VARIANT 55: note = Any amino acid
  VARIANT 56: note = Any amino acid
  VARIANT 57: note = Any amino acid
  VARIANT 58: note = Any amino acid
  VARIANT 59: note = Any amino acid
  VARIANT 60: note = Any amino acid
  VARIANT 61: note = Any amino acid
  VARIANT 62: note = Any amino acid
  VARIANT 63: note = Any amino acid
  VARIANT 64: note = Any amino acid
  VARIANT 65: note = Any amino acid
  VARIANT 66: note = Any amino acid
  VARIANT 67: note = Any amino acid
  VARIANT 68: note = Any amino acid
  VARIANT 69: note = Any amino acid
  VARIANT 70: note = Any amino acid
  VARIANT 71: note = Any amino acid
  VARIANT 72: note = Any amino acid
  VARIANT 73: note = Any amino acid
  VARIANT 74: note = Any amino acid
  VARIANT 75: note = Any amino acid
  VARIANT 76: note = Any amino acid
  VARIANT 77: note = Any amino acid
  VARIANT 78: note = Any amino acid
  VARIANT 79: note = Any amino acid
  VARIANT 80: note = Any amino acid
  VARIANT 81: note = Any amino acid
  VARIANT 82: note = Any amino acid
  VARIANT 83: note = Any amino acid
  VARIANT 84: note = Any amino acid
  VARIANT 85: note = Any amino acid
  VARIANT 86: note = Any amino acid
  VARIANT 87: note = Any amino acid
  VARIANT 88: note = Any amino acid
  VARIANT 90: note = Any amino acid
  VARIANT 92: note = Any amino acid
  VARIANT 93: note = Any amino acid
DXXXXXXXXXXXXXXXXXXXXXXXXXXXXXXXXXXXXXXXXXXXXXXXXEXXXXXXXXXXXXXXXXXXXXXXXXXXXXXXXXXXXXXXKXDXXD

SEQ ID NO: 795634 - protein, 86 aa, unidentified
  VARIANT 2: note = Any amino acid
  VARIANT 3: note = Any amino acid
  VARIANT 4: note = Any amino acid
  VARIANT 5: note = Any amino acid
  VARIANT 6: note = Any amino acid
  VARIANT 7: note = Any amino acid
  VARIANT 8: note = Any amino acid
  VARIANT 9: note = Any amino acid
  VARIANT 10: note = Any amino acid
  VARIANT 11: note = Any amino acid
  VARIANT 12: note = Any amino acid
  VARIANT 13: note = Any amino acid
  VARIANT 14: note = Any amino acid
  VARIANT 15: note = Any amino acid
  VARIANT 16: note = Any amino acid
  VARIANT 17: note = Any amino acid
  VARIANT 18: note = Any amino acid
  VARIANT 19: note = Any amino acid
  VARIANT 20: note = Any amino acid
  VARIANT 21: note = Any amino acid
  VARIANT 22: note = Any amino acid
  VARIANT 23: note = Any amino acid
  VARIANT 24: note = Any amino acid
  VARIANT 25: note = Any amino acid
  VARIANT 26: note = Any amino acid
  VARIANT 27: note = Any amino acid
  VARIANT 28: note = Any amino acid
  VARIANT 29: note = Any amino acid
  VARIANT 30: note = Any amino acid
  VARIANT 31: note = Any amino acid
  VARIANT 32: note = Any amino acid
  VARIANT 33: note = Any amino acid
  VARIANT 34: note = Any amino acid
  VARIANT 35: note = Any amino acid
  VARIANT 36: note = Any amino acid
  VARIANT 37: note = Any amino acid
  VARIANT 38: note = Any amino acid
  VARIANT 39: note = Any amino acid
  VARIANT 40: note = Any amino acid
  VARIANT 41: note = Any amino acid
  VARIANT 42: note = Any amino acid
  VARIANT 43: note = Any amino acid
  VARIANT 44: note = Any amino acid
  VARIANT 45: note = Any amino acid
  VARIANT 46: note = Any amino acid
  VARIANT 48: note = Any amino acid
  VARIANT 49: note = Any amino acid
  VARIANT 50: note = Any amino acid
  VARIANT 51: note = Any amino acid
  VARIANT 52: note = Any amino acid
  VARIANT 53: note = Any amino acid
  VARIANT 54: note = Any amino acid
  VARIANT 55: note = Any amino acid
  VARIANT 56: note = Any amino acid
  VARIANT 57: note = Any amino acid
  VARIANT 58: note = Any amino acid
  VARIANT 59: note = Any amino acid
  VARIANT 60: note = Any amino acid
  VARIANT 61: note = Any amino acid
  VARIANT 62: note = Any amino acid
  VARIANT 63: note = Any amino acid
  VARIANT 64: note = Any amino acid
  VARIANT 65: note = Any amino acid
  VARIANT 66: note = Any amino acid
  VARIANT 67: note = Any amino acid
  VARIANT 68: note = Any amino acid
  VARIANT 69: note = Any amino acid
  VARIANT 70: note = Any amino acid
  VARIANT 71: note = Any amino acid
  VARIANT 72: note = Any amino acid
  VARIANT 73: note = Any amino acid
  VARIANT 74: note = Any amino acid
  VARIANT 75: note = Any amino acid
  VARIANT 76: note = Any amino acid
  VARIANT 77: note = Any amino acid
  VARIANT 78: note = Any amino acid
  VARIANT 79: note = Any amino acid
  VARIANT 80: note = Any amino acid
  VARIANT 82: note = Any amino acid
  VARIANT 84: note = Any amino acid
  VARIANT 85: note = Any amino acid
DXXXXXXXXXXXXXXXXXXXXXXXXXXXXXXXXXXXXXXXXXXXXXEXXXXXXXXXXXXXXXXXXXXXXXXXXXXXXXXXKXDXXD

SEQ ID NO: 795635 - protein, 95 aa, unidentified
  VARIANT 2: note = Any amino acid
  VARIANT 3: note = Any amino acid
  VARIANT 4: note = Any amino acid
  VARIANT 5: note = Any amino acid
  VARIANT 6: note = Any amino acid
  VARIANT 7: note = Any amino acid
  VARIANT 8: note = Any amino acid
  VARIANT 9: note = Any amino acid
  VARIANT 10: note = Any amino acid
  VARIANT 11: note = Any amino acid
  VARIANT 12: note = Any amino acid
  VARIANT 13: note = Any amino acid
  VARIANT 14: note = Any amino acid
  VARIANT 15: note = Any amino acid
  VARIANT 16: note = Any amino acid
  VARIANT 17: note = Any amino acid
  VARIANT 18: note = Any amino acid
  VARIANT 19: note = Any amino acid
  VARIANT 20: note = Any amino acid
  VARIANT 21: note = Any amino acid
  VARIANT 22: note = Any amino acid
  VARIANT 23: note = Any amino acid
  VARIANT 24: note = Any amino acid
  VARIANT 25: note = Any amino acid
  VARIANT 26: note = Any amino acid
  VARIANT 27: note = Any amino acid
  VARIANT 28: note = Any amino acid
  VARIANT 29: note = Any amino acid
  VARIANT 30: note = Any amino acid
  VARIANT 31: note = Any amino acid
  VARIANT 32: note = Any amino acid
  VARIANT 33: note = Any amino acid
  VARIANT 34: note = Any amino acid
  VARIANT 35: note = Any amino acid
  VARIANT 36: note = Any amino acid
  VARIANT 37: note = Any amino acid
  VARIANT 38: note = Any amino acid
  VARIANT 39: note = Any amino acid
  VARIANT 40: note = Any amino acid
  VARIANT 41: note = Any amino acid
  VARIANT 42: note = Any amino acid
  VARIANT 43: note = Any amino acid
  VARIANT 44: note = Any amino acid
  VARIANT 45: note = Any amino acid
  VARIANT 46: note = Any amino acid
  VARIANT 47: note = Any amino acid
  VARIANT 48: note = Any amino acid
  VARIANT 50: note = Any amino acid
  VARIANT 51: note = Any amino acid
  VARIANT 52: note = Any amino acid
  VARIANT 53: note = Any amino acid
  VARIANT 54: note = Any amino acid
  VARIANT 55: note = Any amino acid
  VARIANT 56: note = Any amino acid
  VARIANT 57: note = Any amino acid
  VARIANT 58: note = Any amino acid
  VARIANT 59: note = Any amino acid
  VARIANT 60: note = Any amino acid
  VARIANT 61: note = Any amino acid
  VARIANT 62: note = Any amino acid
  VARIANT 63: note = Any amino acid
  VARIANT 64: note = Any amino acid
  VARIANT 65: note = Any amino acid
  VARIANT 66: note = Any amino acid
  VARIANT 67: note = Any amino acid
  VARIANT 68: note = Any amino acid
  VARIANT 69: note = Any amino acid
  VARIANT 70: note = Any amino acid
  VARIANT 71: note = Any amino acid
  VARIANT 72: note = Any amino acid
  VARIANT 73: note = Any amino acid
  VARIANT 74: note = Any amino acid
  VARIANT 75: note = Any amino acid
  VARIANT 76: note = Any amino acid
  VARIANT 77: note = Any amino acid
  VARIANT 78: note = Any amino acid
  VARIANT 79: note = Any amino acid
  VARIANT 80: note = Any amino acid
  VARIANT 81: note = Any amino acid
  VARIANT 82: note = Any amino acid
  VARIANT 83: note = Any amino acid
  VARIANT 84: note = Any amino acid
  VARIANT 85: note = Any amino acid
  VARIANT 86: note = Any amino acid
  VARIANT 87: note = Any amino acid
  VARIANT 88: note = Any amino acid
  VARIANT 89: note = Any amino acid
  VARIANT 91: note = Any amino acid
  VARIANT 93: note = Any amino acid
  VARIANT 94: note = Any amino acid
DXXXXXXXXXXXXXXXXXXXXXXXXXXXXXXXXXXXXXXXXXXXXXXXAXXXXXXXXXXXXXXXXXXXXXXXXXXXXXXXXXXXXXXXXKXDXXD

SEQ ID NO: 795636 - protein, 89 aa, unidentified
  VARIANT 2: note = Any amino acid
  VARIANT 3: note = Any amino acid
  VARIANT 4: note = Any amino acid
  VARIANT 5: note = Any amino acid
  VARIANT 6: note = Any amino acid
  VARIANT 7: note = Any amino acid
  VARIANT 8: note = Any amino acid
  VARIANT 9: note = Any amino acid
  VARIANT 10: note = Any amino acid
  VARIANT 11: note = Any amino acid
  VARIANT 12: note = Any amino acid
  VARIANT 13: note = Any amino acid
  VARIANT 14: note = Any amino acid
  VARIANT 15: note = Any amino acid
  VARIANT 16: note = Any amino acid
  VARIANT 17: note = Any amino acid
  VARIANT 18: note = Any amino acid
  VARIANT 19: note = Any amino acid
  VARIANT 20: note = Any amino acid
  VARIANT 21: note = Any amino acid
  VARIANT 22: note = Any amino acid
  VARIANT 23: note = Any amino acid
  VARIANT 24: note = Any amino acid
  VARIANT 25: note = Any amino acid
  VARIANT 26: note = Any amino acid
  VARIANT 27: note = Any amino acid
  VARIANT 28: note = Any amino acid
  VARIANT 29: note = Any amino acid
  VARIANT 30: note = Any amino acid
  VARIANT 31: note = Any amino acid
  VARIANT 32: note = Any amino acid
  VARIANT 33: note = Any amino acid
  VARIANT 34: note = Any amino acid
  VARIANT 35: note = Any amino acid
  VARIANT 36: note = Any amino acid
  VARIANT 37: note = Any amino acid
  VARIANT 38: note = Any amino acid
  VARIANT 39: note = Any amino acid
  VARIANT 40: note = Any amino acid
  VARIANT 41: note = Any amino acid
  VARIANT 42: note = Any amino acid
  VARIANT 43: note = Any amino acid
  VARIANT 44: note = Any amino acid
  VARIANT 45: note = Any amino acid
  VARIANT 46: note = Any amino acid
  VARIANT 47: note = Any amino acid
  VARIANT 49: note = Any amino acid
  VARIANT 50: note = Any amino acid
  VARIANT 51: note = Any amino acid
  VARIANT 52: note = Any amino acid
  VARIANT 53: note = Any amino acid
  VARIANT 54: note = Any amino acid
  VARIANT 55: note = Any amino acid
  VARIANT 56: note = Any amino acid
  VARIANT 57: note = Any amino acid
  VARIANT 58: note = Any amino acid
  VARIANT 59: note = Any amino acid
  VARIANT 60: note = Any amino acid
  VARIANT 61: note = Any amino acid
  VARIANT 62: note = Any amino acid
  VARIANT 63: note = Any amino acid
  VARIANT 64: note = Any amino acid
  VARIANT 65: note = Any amino acid
  VARIANT 66: note = Any amino acid
  VARIANT 67: note = Any amino acid
  VARIANT 68: note = Any amino acid
  VARIANT 69: note = Any amino acid
  VARIANT 70: note = Any amino acid
  VARIANT 71: note = Any amino acid
  VARIANT 72: note = Any amino acid
  VARIANT 73: note = Any amino acid
  VARIANT 74: note = Any amino acid
  VARIANT 75: note = Any amino acid
  VARIANT 76: note = Any amino acid
  VARIANT 77: note = Any amino acid
  VARIANT 78: note = Any amino acid
  VARIANT 79: note = Any amino acid
  VARIANT 80: note = Any amino acid
  VARIANT 81: note = Any amino acid
  VARIANT 82: note = Any amino acid
  VARIANT 83: note = Any amino acid
  VARIANT 85: note = Any amino acid
  VARIANT 87: note = Any amino acid
  VARIANT 88: note = Any amino acid
DXXXXXXXXXXXXXXXXXXXXXXXXXXXXXXXXXXXXXXXXXXXXXXEXXXXXXXXXXXXXXXXXXXXXXXXXXXXXXXXXXXKXDXXD

SEQ ID NO: 795637 - protein, 97 aa, unidentified
  VARIANT 2: note = Any amino acid
  VARIANT 3: note = Any amino acid
  VARIANT 4: note = Any amino acid
  VARIANT 5: note = Any amino acid
  VARIANT 6: note = Any amino acid
  VARIANT 7: note = Any amino acid
  VARIANT 8: note = Any amino acid
  VARIANT 9: note = Any amino acid
  VARIANT 10: note = Any amino acid
  VARIANT 11: note = Any amino acid
  VARIANT 12: note = Any amino acid
  VARIANT 13: note = Any amino acid
  VARIANT 14: note = Any amino acid
  VARIANT 15: note = Any amino acid
  VARIANT 16: note = Any amino acid
  VARIANT 17: note = Any amino acid
  VARIANT 18: note = Any amino acid
  VARIANT 19: note = Any amino acid
  VARIANT 20: note = Any amino acid
  VARIANT 21: note = Any amino acid
  VARIANT 22: note = Any amino acid
  VARIANT 23: note = Any amino acid
  VARIANT 24: note = Any amino acid
  VARIANT 25: note = Any amino acid
  VARIANT 26: note = Any amino acid
  VARIANT 27: note = Any amino acid
  VARIANT 28: note = Any amino acid
  VARIANT 29: note = Any amino acid
  VARIANT 30: note = Any amino acid
  VARIANT 31: note = Any amino acid
  VARIANT 32: note = Any amino acid
  VARIANT 33: note = Any amino acid
  VARIANT 34: note = Any amino acid
  VARIANT 35: note = Any amino acid
  VARIANT 36: note = Any amino acid
  VARIANT 37: note = Any amino acid
  VARIANT 38: note = Any amino acid
  VARIANT 39: note = Any amino acid
  VARIANT 40: note = Any amino acid
  VARIANT 41: note = Any amino acid
  VARIANT 42: note = Any amino acid
  VARIANT 43: note = Any amino acid
  VARIANT 44: note = Any amino acid
  VARIANT 45: note = Any amino acid
  VARIANT 46: note = Any amino acid
  VARIANT 47: note = Any amino acid
  VARIANT 48: note = Any amino acid
  VARIANT 49: note = Any amino acid
  VARIANT 50: note = Any amino acid
  VARIANT 51: note = Any amino acid
  VARIANT 53: note = Any amino acid
  VARIANT 54: note = Any amino acid
  VARIANT 55: note = Any amino acid
  VARIANT 56: note = Any amino acid
  VARIANT 57: note = Any amino acid
  VARIANT 58: note = Any amino acid
  VARIANT 59: note = Any amino acid
  VARIANT 60: note = Any amino acid
  VARIANT 61: note = Any amino acid
  VARIANT 62: note = Any amino acid
  VARIANT 63: note = Any amino acid
  VARIANT 64: note = Any amino acid
  VARIANT 65: note = Any amino acid
  VARIANT 66: note = Any amino acid
  VARIANT 67: note = Any amino acid
  VARIANT 68: note = Any amino acid
  VARIANT 69: note = Any amino acid
  VARIANT 70: note = Any amino acid
  VARIANT 71: note = Any amino acid
  VARIANT 72: note = Any amino acid
  VARIANT 73: note = Any amino acid
  VARIANT 74: note = Any amino acid
  VARIANT 75: note = Any amino acid
  VARIANT 76: note = Any amino acid
  VARIANT 77: note = Any amino acid
  VARIANT 78: note = Any amino acid
  VARIANT 79: note = Any amino acid
  VARIANT 80: note = Any amino acid
  VARIANT 81: note = Any amino acid
  VARIANT 82: note = Any amino acid
  VARIANT 83: note = Any amino acid
  VARIANT 84: note = Any amino acid
  VARIANT 85: note = Any amino acid
  VARIANT 86: note = Any amino acid
  VARIANT 87: note = Any amino acid
  VARIANT 88: note = Any amino acid
  VARIANT 89: note = Any amino acid
  VARIANT 90: note = Any amino acid
  VARIANT 91: note = Any amino acid
  VARIANT 93: note = Any amino acid
  VARIANT 95: note = Any amino acid
  VARIANT 96: note = Any amino acid
DXXXXXXXXXXXXXXXXXXXXXXXXXXXXXXXXXXXXXXXXXXXXXXXXXXDXXXXXXXXXXXXXXXXXXXXXXXXXXXXXXXXXXXXXXXKXDXXD

SEQ ID NO: 795638 - protein, 96 aa, unidentified
  VARIANT 2: note = Any amino acid
  VARIANT 3: note = Any amino acid
  VARIANT 4: note = Any amino acid
  VARIANT 5: note = Any amino acid
  VARIANT 6: note = Any amino acid
  VARIANT 7: note = Any amino acid
  VARIANT 8: note = Any amino acid
  VARIANT 9: note = Any amino acid
  VARIANT 10: note = Any amino acid
  VARIANT 11: note = Any amino acid
  VARIANT 12: note = Any amino acid
  VARIANT 13: note = Any amino acid
  VARIANT 14: note = Any amino acid
  VARIANT 15: note = Any amino acid
  VARIANT 16: note = Any amino acid
  VARIANT 17: note = Any amino acid
  VARIANT 18: note = Any amino acid
  VARIANT 19: note = Any amino acid
  VARIANT 20: note = Any amino acid
  VARIANT 21: note = Any amino acid
  VARIANT 22: note = Any amino acid
  VARIANT 23: note = Any amino acid
  VARIANT 24: note = Any amino acid
  VARIANT 25: note = Any amino acid
  VARIANT 26: note = Any amino acid
  VARIANT 27: note = Any amino acid
  VARIANT 28: note = Any amino acid
  VARIANT 29: note = Any amino acid
  VARIANT 30: note = Any amino acid
  VARIANT 31: note = Any amino acid
  VARIANT 32: note = Any amino acid
  VARIANT 33: note = Any amino acid
  VARIANT 34: note = Any amino acid
  VARIANT 35: note = Any amino acid
  VARIANT 36: note = Any amino acid
  VARIANT 37: note = Any amino acid
  VARIANT 38: note = Any amino acid
  VARIANT 39: note = Any amino acid
  VARIANT 40: note = Any amino acid
  VARIANT 41: note = Any amino acid
  VARIANT 42: note = Any amino acid
  VARIANT 43: note = Any amino acid
  VARIANT 44: note = Any amino acid
  VARIANT 45: note = Any amino acid
  VARIANT 46: note = Any amino acid
  VARIANT 47: note = Any amino acid
  VARIANT 48: note = Any amino acid
  VARIANT 49: note = Any amino acid
  VARIANT 51: note = Any amino acid
  VARIANT 52: note = Any amino acid
  VARIANT 53: note = Any amino acid
  VARIANT 54: note = Any amino acid
  VARIANT 55: note = Any amino acid
  VARIANT 56: note = Any amino acid
  VARIANT 57: note = Any amino acid
  VARIANT 58: note = Any amino acid
  VARIANT 59: note = Any amino acid
  VARIANT 60: note = Any amino acid
  VARIANT 61: note = Any amino acid
  VARIANT 62: note = Any amino acid
  VARIANT 63: note = Any amino acid
  VARIANT 64: note = Any amino acid
  VARIANT 65: note = Any amino acid
  VARIANT 66: note = Any amino acid
  VARIANT 67: note = Any amino acid
  VARIANT 68: note = Any amino acid
  VARIANT 69: note = Any amino acid
  VARIANT 70: note = Any amino acid
  VARIANT 71: note = Any amino acid
  VARIANT 72: note = Any amino acid
  VARIANT 73: note = Any amino acid
  VARIANT 74: note = Any amino acid
  VARIANT 75: note = Any amino acid
  VARIANT 76: note = Any amino acid
  VARIANT 77: note = Any amino acid
  VARIANT 78: note = Any amino acid
  VARIANT 79: note = Any amino acid
  VARIANT 80: note = Any amino acid
  VARIANT 81: note = Any amino acid
  VARIANT 82: note = Any amino acid
  VARIANT 83: note = Any amino acid
  VARIANT 84: note = Any amino acid
  VARIANT 85: note = Any amino acid
  VARIANT 86: note = Any amino acid
  VARIANT 87: note = Any amino acid
  VARIANT 88: note = Any amino acid
  VARIANT 89: note = Any amino acid
  VARIANT 90: note = Any amino acid
  VARIANT 92: note = Any amino acid
  VARIANT 94: note = Any amino acid
  VARIANT 95: note = Any amino acid
DXXXXXXXXXXXXXXXXXXXXXXXXXXXXXXXXXXXXXXXXXXXXXXXXVXXXXXXXXXXXXXXXXXXXXXXXXXXXXXXXXXXXXXXXXKXDXXD

SEQ ID NO: 795639 - protein, 89 aa, unidentified
  VARIANT 2: note = Any amino acid
  VARIANT 3: note = Any amino acid
  VARIANT 4: note = Any amino acid
  VARIANT 5: note = Any amino acid
  VARIANT 6: note = Any amino acid
  VARIANT 7: note = Any amino acid
  VARIANT 8: note = Any amino acid
  VARIANT 9: note = Any amino acid
  VARIANT 10: note = Any amino acid
  VARIANT 11: note = Any amino acid
  VARIANT 12: note = Any amino acid
  VARIANT 13: note = Any amino acid
  VARIANT 14: note = Any amino acid
  VARIANT 15: note = Any amino acid
  VARIANT 16: note = Any amino acid
  VARIANT 17: note = Any amino acid
  VARIANT 18: note = Any amino acid
  VARIANT 19: note = Any amino acid
  VARIANT 20: note = Any amino acid
  VARIANT 21: note = Any amino acid
  VARIANT 22: note = Any amino acid
  VARIANT 23: note = Any amino acid
  VARIANT 24: note = Any amino acid
  VARIANT 25: note = Any amino acid
  VARIANT 26: note = Any amino acid
  VARIANT 27: note = Any amino acid
  VARIANT 28: note = Any amino acid
  VARIANT 29: note = Any amino acid
  VARIANT 30: note = Any amino acid
  VARIANT 31: note = Any amino acid
  VARIANT 32: note = Any amino acid
  VARIANT 33: note = Any amino acid
  VARIANT 34: note = Any amino acid
  VARIANT 35: note = Any amino acid
  VARIANT 36: note = Any amino acid
  VARIANT 37: note = Any amino acid
  VARIANT 38: note = Any amino acid
  VARIANT 39: note = Any amino acid
  VARIANT 40: note = Any amino acid
  VARIANT 41: note = Any amino acid
  VARIANT 42: note = Any amino acid
  VARIANT 43: note = Any amino acid
  VARIANT 44: note = Any amino acid
  VARIANT 45: note = Any amino acid
  VARIANT 47: note = Any amino acid
  VARIANT 48: note = Any amino acid
  VARIANT 49: note = Any amino acid
  VARIANT 50: note = Any amino acid
  VARIANT 51: note = Any amino acid
  VARIANT 52: note = Any amino acid
  VARIANT 53: note = Any amino acid
  VARIANT 54: note = Any amino acid
  VARIANT 55: note = Any amino acid
  VARIANT 56: note = Any amino acid
  VARIANT 57: note = Any amino acid
  VARIANT 58: note = Any amino acid
  VARIANT 59: note = Any amino acid
  VARIANT 60: note = Any amino acid
  VARIANT 61: note = Any amino acid
  VARIANT 62: note = Any amino acid
  VARIANT 63: note = Any amino acid
  VARIANT 64: note = Any amino acid
  VARIANT 65: note = Any amino acid
  VARIANT 66: note = Any amino acid
  VARIANT 67: note = Any amino acid
  VARIANT 68: note = Any amino acid
  VARIANT 69: note = Any amino acid
  VARIANT 70: note = Any amino acid
  VARIANT 71: note = Any amino acid
  VARIANT 72: note = Any amino acid
  VARIANT 73: note = Any amino acid
  VARIANT 74: note = Any amino acid
  VARIANT 75: note = Any amino acid
  VARIANT 76: note = Any amino acid
  VARIANT 77: note = Any amino acid
  VARIANT 78: note = Any amino acid
  VARIANT 79: note = Any amino acid
  VARIANT 80: note = Any amino acid
  VARIANT 81: note = Any amino acid
  VARIANT 82: note = Any amino acid
  VARIANT 83: note = Any amino acid
  VARIANT 85: note = Any amino acid
  VARIANT 87: note = Any amino acid
  VARIANT 88: note = Any amino acid
DXXXXXXXXXXXXXXXXXXXXXXXXXXXXXXXXXXXXXXXXXXXXEXXXXXXXXXXXXXXXXXXXXXXXXXXXXXXXXXXXXXKXDXXD

SEQ ID NO: 795640 - protein, 86 aa, unidentified
  VARIANT 2: note = Any amino acid
  VARIANT 3: note = Any amino acid
  VARIANT 4: note = Any amino acid
  VARIANT 5: note = Any amino acid
  VARIANT 6: note = Any amino acid
  VARIANT 7: note = Any amino acid
  VARIANT 8: note = Any amino acid
  VARIANT 9: note = Any amino acid
  VARIANT 10: note = Any amino acid
  VARIANT 11: note = Any amino acid
  VARIANT 12: note = Any amino acid
  VARIANT 13: note = Any amino acid
  VARIANT 14: note = Any amino acid
  VARIANT 15: note = Any amino acid
  VARIANT 16: note = Any amino acid
  VARIANT 17: note = Any amino acid
  VARIANT 18: note = Any amino acid
  VARIANT 19: note = Any amino acid
  VARIANT 20: note = Any amino acid
  VARIANT 21: note = Any amino acid
  VARIANT 22: note = Any amino acid
  VARIANT 23: note = Any amino acid
  VARIANT 24: note = Any amino acid
  VARIANT 25: note = Any amino acid
  VARIANT 26: note = Any amino acid
  VARIANT 27: note = Any amino acid
  VARIANT 28: note = Any amino acid
  VARIANT 29: note = Any amino acid
  VARIANT 30: note = Any amino acid
  VARIANT 31: note = Any amino acid
  VARIANT 32: note = Any amino acid
  VARIANT 33: note = Any amino acid
  VARIANT 34: note = Any amino acid
  VARIANT 35: note = Any amino acid
  VARIANT 36: note = Any amino acid
  VARIANT 37: note = Any amino acid
  VARIANT 38: note = Any amino acid
  VARIANT 39: note = Any amino acid
  VARIANT 40: note = Any amino acid
  VARIANT 42: note = Any amino acid
  VARIANT 43: note = Any amino acid
  VARIANT 44: note = Any amino acid
  VARIANT 45: note = Any amino acid
  VARIANT 46: note = Any amino acid
  VARIANT 47: note = Any amino acid
  VARIANT 48: note = Any amino acid
  VARIANT 49: note = Any amino acid
  VARIANT 50: note = Any amino acid
  VARIANT 51: note = Any amino acid
  VARIANT 52: note = Any amino acid
  VARIANT 53: note = Any amino acid
  VARIANT 54: note = Any amino acid
  VARIANT 55: note = Any amino acid
  VARIANT 56: note = Any amino acid
  VARIANT 57: note = Any amino acid
  VARIANT 58: note = Any amino acid
  VARIANT 59: note = Any amino acid
  VARIANT 60: note = Any amino acid
  VARIANT 61: note = Any amino acid
  VARIANT 62: note = Any amino acid
  VARIANT 63: note = Any amino acid
  VARIANT 64: note = Any amino acid
  VARIANT 65: note = Any amino acid
  VARIANT 66: note = Any amino acid
  VARIANT 67: note = Any amino acid
  VARIANT 68: note = Any amino acid
  VARIANT 69: note = Any amino acid
  VARIANT 70: note = Any amino acid
  VARIANT 71: note = Any amino acid
  VARIANT 72: note = Any amino acid
  VARIANT 73: note = Any amino acid
  VARIANT 74: note = Any amino acid
  VARIANT 75: note = Any amino acid
  VARIANT 76: note = Any amino acid
  VARIANT 77: note = Any amino acid
  VARIANT 78: note = Any amino acid
  VARIANT 79: note = Any amino acid
  VARIANT 80: note = Any amino acid
  VARIANT 82: note = Any amino acid
  VARIANT 84: note = Any amino acid
  VARIANT 85: note = Any amino acid
DXXXXXXXXXXXXXXXXXXXXXXXXXXXXXXXXXXXXXXXEXXXXXXXXXXXXXXXXXXXXXXXXXXXXXXXXXXXXXXXKXDXXD

SEQ ID NO: 795641 - protein, 97 aa, unidentified
  VARIANT 2: note = Any amino acid
  VARIANT 3: note = Any amino acid
  VARIANT 4: note = Any amino acid
  VARIANT 5: note = Any amino acid
  VARIANT 6: note = Any amino acid
  VARIANT 7: note = Any amino acid
  VARIANT 8: note = Any amino acid
  VARIANT 9: note = Any amino acid
  VARIANT 10: note = Any amino acid
  VARIANT 11: note = Any amino acid
  VARIANT 12: note = Any amino acid
  VARIANT 13: note = Any amino acid
  VARIANT 14: note = Any amino acid
  VARIANT 15: note = Any amino acid
  VARIANT 16: note = Any amino acid
  VARIANT 17: note = Any amino acid
  VARIANT 18: note = Any amino acid
  VARIANT 19: note = Any amino acid
  VARIANT 20: note = Any amino acid
  VARIANT 21: note = Any amino acid
  VARIANT 22: note = Any amino acid
  VARIANT 23: note = Any amino acid
  VARIANT 24: note = Any amino acid
  VARIANT 25: note = Any amino acid
  VARIANT 26: note = Any amino acid
  VARIANT 27: note = Any amino acid
  VARIANT 28: note = Any amino acid
  VARIANT 29: note = Any amino acid
  VARIANT 30: note = Any amino acid
  VARIANT 31: note = Any amino acid
  VARIANT 32: note = Any amino acid
  VARIANT 33: note = Any amino acid
  VARIANT 34: note = Any amino acid
  VARIANT 35: note = Any amino acid
  VARIANT 36: note = Any amino acid
  VARIANT 37: note = Any amino acid
  VARIANT 38: note = Any amino acid
  VARIANT 39: note = Any amino acid
  VARIANT 40: note = Any amino acid
  VARIANT 41: note = Any amino acid
  VARIANT 42: note = Any amino acid
  VARIANT 43: note = Any amino acid
  VARIANT 44: note = Any amino acid
  VARIANT 45: note = Any amino acid
  VARIANT 46: note = Any amino acid
  VARIANT 47: note = Any amino acid
  VARIANT 48: note = Any amino acid
  VARIANT 49: note = Any amino acid
  VARIANT 50: note = Any amino acid
  VARIANT 52: note = Any amino acid
  VARIANT 53: note = Any amino acid
  VARIANT 54: note = Any amino acid
  VARIANT 55: note = Any amino acid
  VARIANT 56: note = Any amino acid
  VARIANT 57: note = Any amino acid
  VARIANT 58: note = Any amino acid
  VARIANT 59: note = Any amino acid
  VARIANT 60: note = Any amino acid
  VARIANT 61: note = Any amino acid
  VARIANT 62: note = Any amino acid
  VARIANT 63: note = Any amino acid
  VARIANT 64: note = Any amino acid
  VARIANT 65: note = Any amino acid
  VARIANT 66: note = Any amino acid
  VARIANT 67: note = Any amino acid
  VARIANT 68: note = Any amino acid
  VARIANT 69: note = Any amino acid
  VARIANT 70: note = Any amino acid
  VARIANT 71: note = Any amino acid
  VARIANT 72: note = Any amino acid
  VARIANT 73: note = Any amino acid
  VARIANT 74: note = Any amino acid
  VARIANT 75: note = Any amino acid
  VARIANT 76: note = Any amino acid
  VARIANT 77: note = Any amino acid
  VARIANT 78: note = Any amino acid
  VARIANT 79: note = Any amino acid
  VARIANT 80: note = Any amino acid
  VARIANT 81: note = Any amino acid
  VARIANT 82: note = Any amino acid
  VARIANT 83: note = Any amino acid
  VARIANT 84: note = Any amino acid
  VARIANT 85: note = Any amino acid
  VARIANT 86: note = Any amino acid
  VARIANT 87: note = Any amino acid
  VARIANT 88: note = Any amino acid
  VARIANT 89: note = Any amino acid
  VARIANT 90: note = Any amino acid
  VARIANT 91: note = Any amino acid
  VARIANT 93: note = Any amino acid
  VARIANT 95: note = Any amino acid
  VARIANT 96: note = Any amino acid
DXXXXXXXXXXXXXXXXXXXXXXXXXXXXXXXXXXXXXXXXXXXXXXXXXEXXXXXXXXXXXXXXXXXXXXXXXXXXXXXXXXXXXXXXXXQXDXXD

SEQ ID NO: 795642 - protein, 90 aa, unidentified
  VARIANT 2: note = Any amino acid
  VARIANT 3: note = Any amino acid
  VARIANT 4: note = Any amino acid
  VARIANT 5: note = Any amino acid
  VARIANT 6: note = Any amino acid
  VARIANT 7: note = Any amino acid
  VARIANT 8: note = Any amino acid
  VARIANT 9: note = Any amino acid
  VARIANT 10: note = Any amino acid
  VARIANT 11: note = Any amino acid
  VARIANT 12: note = Any amino acid
  VARIANT 13: note = Any amino acid
  VARIANT 14: note = Any amino acid
  VARIANT 15: note = Any amino acid
  VARIANT 16: note = Any amino acid
  VARIANT 17: note = Any amino acid
  VARIANT 18: note = Any amino acid
  VARIANT 19: note = Any amino acid
  VARIANT 20: note = Any amino acid
  VARIANT 21: note = Any amino acid
  VARIANT 22: note = Any amino acid
  VARIANT 23: note = Any amino acid
  VARIANT 24: note = Any amino acid
  VARIANT 25: note = Any amino acid
  VARIANT 26: note = Any amino acid
  VARIANT 27: note = Any amino acid
  VARIANT 28: note = Any amino acid
  VARIANT 29: note = Any amino acid
  VARIANT 30: note = Any amino acid
  VARIANT 31: note = Any amino acid
  VARIANT 32: note = Any amino acid
  VARIANT 33: note = Any amino acid
  VARIANT 34: note = Any amino acid
  VARIANT 35: note = Any amino acid
  VARIANT 36: note = Any amino acid
  VARIANT 37: note = Any amino acid
  VARIANT 38: note = Any amino acid
  VARIANT 39: note = Any amino acid
  VARIANT 40: note = Any amino acid
  VARIANT 41: note = Any amino acid
  VARIANT 42: note = Any amino acid
  VARIANT 43: note = Any amino acid
  VARIANT 44: note = Any amino acid
  VARIANT 45: note = Any amino acid
  VARIANT 46: note = Any amino acid
  VARIANT 47: note = Any amino acid
  VARIANT 48: note = Any amino acid
  VARIANT 50: note = Any amino acid
  VARIANT 51: note = Any amino acid
  VARIANT 52: note = Any amino acid
  VARIANT 53: note = Any amino acid
  VARIANT 54: note = Any amino acid
  VARIANT 55: note = Any amino acid
  VARIANT 56: note = Any amino acid
  VARIANT 57: note = Any amino acid
  VARIANT 58: note = Any amino acid
  VARIANT 59: note = Any amino acid
  VARIANT 60: note = Any amino acid
  VARIANT 61: note = Any amino acid
  VARIANT 62: note = Any amino acid
  VARIANT 63: note = Any amino acid
  VARIANT 64: note = Any amino acid
  VARIANT 65: note = Any amino acid
  VARIANT 66: note = Any amino acid
  VARIANT 67: note = Any amino acid
  VARIANT 68: note = Any amino acid
  VARIANT 69: note = Any amino acid
  VARIANT 70: note = Any amino acid
  VARIANT 71: note = Any amino acid
  VARIANT 72: note = Any amino acid
  VARIANT 73: note = Any amino acid
  VARIANT 74: note = Any amino acid
  VARIANT 75: note = Any amino acid
  VARIANT 76: note = Any amino acid
  VARIANT 77: note = Any amino acid
  VARIANT 78: note = Any amino acid
  VARIANT 79: note = Any amino acid
  VARIANT 80: note = Any amino acid
  VARIANT 81: note = Any amino acid
  VARIANT 82: note = Any amino acid
  VARIANT 83: note = Any amino acid
  VARIANT 84: note = Any amino acid
  VARIANT 86: note = Any amino acid
  VARIANT 88: note = Any amino acid
  VARIANT 89: note = Any amino acid
DXXXXXXXXXXXXXXXXXXXXXXXXXXXXXXXXXXXXXXXXXXXXXXXEXXXXXXXXXXXXXXXXXXXXXXXXXXXXXXXXXXXKXDXXD

SEQ ID NO: 795643 - protein, 102 aa, unidentified
  VARIANT 2: note = Any amino acid
  VARIANT 3: note = Any amino acid
  VARIANT 4: note = Any amino acid
  VARIANT 5: note = Any amino acid
  VARIANT 6: note = Any amino acid
  VARIANT 7: note = Any amino acid
  VARIANT 8: note = Any amino acid
  VARIANT 9: note = Any amino acid
  VARIANT 10: note = Any amino acid
  VARIANT 11: note = Any amino acid
  VARIANT 12: note = Any amino acid
  VARIANT 13: note = Any amino acid
  VARIANT 14: note = Any amino acid
  VARIANT 15: note = Any amino acid
  VARIANT 16: note = Any amino acid
  VARIANT 17: note = Any amino acid
  VARIANT 18: note = Any amino acid
  VARIANT 19: note = Any amino acid
  VARIANT 20: note = Any amino acid
  VARIANT 21: note = Any amino acid
  VARIANT 22: note = Any amino acid
  VARIANT 23: note = Any amino acid
  VARIANT 24: note = Any amino acid
  VARIANT 25: note = Any amino acid
  VARIANT 26: note = Any amino acid
  VARIANT 27: note = Any amino acid
  VARIANT 28: note = Any amino acid
  VARIANT 29: note = Any amino acid
  VARIANT 30: note = Any amino acid
  VARIANT 31: note = Any amino acid
  VARIANT 32: note = Any amino acid
  VARIANT 33: note = Any amino acid
  VARIANT 34: note = Any amino acid
  VARIANT 35: note = Any amino acid
  VARIANT 36: note = Any amino acid
  VARIANT 37: note = Any amino acid
  VARIANT 38: note = Any amino acid
  VARIANT 39: note = Any amino acid
  VARIANT 40: note = Any amino acid
  VARIANT 41: note = Any amino acid
  VARIANT 42: note = Any amino acid
  VARIANT 43: note = Any amino acid
  VARIANT 44: note = Any amino acid
  VARIANT 45: note = Any amino acid
  VARIANT 46: note = Any amino acid
  VARIANT 47: note = Any amino acid
  VARIANT 48: note = Any amino acid
  VARIANT 49: note = Any amino acid
  VARIANT 50: note = Any amino acid
  VARIANT 51: note = Any amino acid
  VARIANT 52: note = Any amino acid
  VARIANT 53: note = Any amino acid
  VARIANT 54: note = Any amino acid
  VARIANT 55: note = Any amino acid
  VARIANT 56: note = Any amino acid
  VARIANT 58: note = Any amino acid
  VARIANT 59: note = Any amino acid
  VARIANT 60: note = Any amino acid
  VARIANT 61: note = Any amino acid
  VARIANT 62: note = Any amino acid
  VARIANT 63: note = Any amino acid
  VARIANT 64: note = Any amino acid
  VARIANT 65: note = Any amino acid
  VARIANT 66: note = Any amino acid
  VARIANT 67: note = Any amino acid
  VARIANT 68: note = Any amino acid
  VARIANT 69: note = Any amino acid
  VARIANT 70: note = Any amino acid
  VARIANT 71: note = Any amino acid
  VARIANT 72: note = Any amino acid
  VARIANT 73: note = Any amino acid
  VARIANT 74: note = Any amino acid
  VARIANT 75: note = Any amino acid
  VARIANT 76: note = Any amino acid
  VARIANT 77: note = Any amino acid
  VARIANT 78: note = Any amino acid
  VARIANT 79: note = Any amino acid
  VARIANT 80: note = Any amino acid
  VARIANT 81: note = Any amino acid
  VARIANT 82: note = Any amino acid
  VARIANT 83: note = Any amino acid
  VARIANT 84: note = Any amino acid
  VARIANT 85: note = Any amino acid
  VARIANT 86: note = Any amino acid
  VARIANT 87: note = Any amino acid
  VARIANT 88: note = Any amino acid
  VARIANT 89: note = Any amino acid
  VARIANT 90: note = Any amino acid
  VARIANT 91: note = Any amino acid
  VARIANT 92: note = Any amino acid
  VARIANT 93: note = Any amino acid
  VARIANT 94: note = Any amino acid
  VARIANT 95: note = Any amino acid
  VARIANT 96: note = Any amino acid
  VARIANT 98: note = Any amino acid
  VARIANT 100: note = Any amino acid
  VARIANT 101: note = Any amino acid
DXXXXXXXXXXXXXXXXXXXXXXXXXXXXXXXXXXXXXXXXXXXXXXXXXXXXXXXEXXXXXXXXXXXXXXXXXXXXXXXXXXXXXXXXXXXXXXXIXDXXA

SEQ ID NO: 795644 - protein, 98 aa, unidentified
  VARIANT 2: note = Any amino acid
  VARIANT 3: note = Any amino acid
  VARIANT 4: note = Any amino acid
  VARIANT 5: note = Any amino acid
  VARIANT 6: note = Any amino acid
  VARIANT 7: note = Any amino acid
  VARIANT 8: note = Any amino acid
  VARIANT 9: note = Any amino acid
  VARIANT 10: note = Any amino acid
  VARIANT 11: note = Any amino acid
  VARIANT 12: note = Any amino acid
  VARIANT 13: note = Any amino acid
  VARIANT 14: note = Any amino acid
  VARIANT 15: note = Any amino acid
  VARIANT 16: note = Any amino acid
  VARIANT 17: note = Any amino acid
  VARIANT 18: note = Any amino acid
  VARIANT 19: note = Any amino acid
  VARIANT 20: note = Any amino acid
  VARIANT 21: note = Any amino acid
  VARIANT 22: note = Any amino acid
  VARIANT 23: note = Any amino acid
  VARIANT 24: note = Any amino acid
  VARIANT 25: note = Any amino acid
  VARIANT 26: note = Any amino acid
  VARIANT 27: note = Any amino acid
  VARIANT 28: note = Any amino acid
  VARIANT 29: note = Any amino acid
  VARIANT 30: note = Any amino acid
  VARIANT 31: note = Any amino acid
  VARIANT 32: note = Any amino acid
  VARIANT 33: note = Any amino acid
  VARIANT 34: note = Any amino acid
  VARIANT 35: note = Any amino acid
  VARIANT 36: note = Any amino acid
  VARIANT 37: note = Any amino acid
  VARIANT 38: note = Any amino acid
  VARIANT 39: note = Any amino acid
  VARIANT 40: note = Any amino acid
  VARIANT 41: note = Any amino acid
  VARIANT 42: note = Any amino acid
  VARIANT 43: note = Any amino acid
  VARIANT 44: note = Any amino acid
  VARIANT 45: note = Any amino acid
  VARIANT 46: note = Any amino acid
  VARIANT 47: note = Any amino acid
  VARIANT 48: note = Any amino acid
  VARIANT 49: note = Any amino acid
  VARIANT 50: note = Any amino acid
  VARIANT 51: note = Any amino acid
  VARIANT 52: note = Any amino acid
  VARIANT 53: note = Any amino acid
  VARIANT 55: note = Any amino acid
  VARIANT 56: note = Any amino acid
  VARIANT 57: note = Any amino acid
  VARIANT 58: note = Any amino acid
  VARIANT 59: note = Any amino acid
  VARIANT 60: note = Any amino acid
  VARIANT 61: note = Any amino acid
  VARIANT 62: note = Any amino acid
  VARIANT 63: note = Any amino acid
  VARIANT 64: note = Any amino acid
  VARIANT 65: note = Any amino acid
  VARIANT 66: note = Any amino acid
  VARIANT 67: note = Any amino acid
  VARIANT 68: note = Any amino acid
  VARIANT 69: note = Any amino acid
  VARIANT 70: note = Any amino acid
  VARIANT 71: note = Any amino acid
  VARIANT 72: note = Any amino acid
  VARIANT 73: note = Any amino acid
  VARIANT 74: note = Any amino acid
  VARIANT 75: note = Any amino acid
  VARIANT 76: note = Any amino acid
  VARIANT 77: note = Any amino acid
  VARIANT 78: note = Any amino acid
  VARIANT 79: note = Any amino acid
  VARIANT 80: note = Any amino acid
  VARIANT 81: note = Any amino acid
  VARIANT 82: note = Any amino acid
  VARIANT 83: note = Any amino acid
  VARIANT 84: note = Any amino acid
  VARIANT 85: note = Any amino acid
  VARIANT 86: note = Any amino acid
  VARIANT 87: note = Any amino acid
  VARIANT 88: note = Any amino acid
  VARIANT 89: note = Any amino acid
  VARIANT 90: note = Any amino acid
  VARIANT 91: note = Any amino acid
  VARIANT 92: note = Any amino acid
  VARIANT 94: note = Any amino acid
  VARIANT 96: note = Any amino acid
  VARIANT 97: note = Any amino acid
DXXXXXXXXXXXXXXXXXXXXXXXXXXXXXXXXXXXXXXXXXXXXXXXXXXXXEXXXXXXXXXXXXXXXXXXXXXXXXXXXXXXXXXXXXXXKXDXXD

SEQ ID NO: 795645 - protein, 91 aa, unidentified
  VARIANT 2: note = Any amino acid
  VARIANT 3: note = Any amino acid
  VARIANT 4: note = Any amino acid
  VARIANT 5: note = Any amino acid
  VARIANT 6: note = Any amino acid
  VARIANT 7: note = Any amino acid
  VARIANT 8: note = Any amino acid
  VARIANT 9: note = Any amino acid
  VARIANT 10: note = Any amino acid
  VARIANT 11: note = Any amino acid
  VARIANT 12: note = Any amino acid
  VARIANT 13: note = Any amino acid
  VARIANT 14: note = Any amino acid
  VARIANT 15: note = Any amino acid
  VARIANT 16: note = Any amino acid
  VARIANT 17: note = Any amino acid
  VARIANT 18: note = Any amino acid
  VARIANT 19: note = Any amino acid
  VARIANT 20: note = Any amino acid
  VARIANT 21: note = Any amino acid
  VARIANT 22: note = Any amino acid
  VARIANT 23: note = Any amino acid
  VARIANT 24: note = Any amino acid
  VARIANT 25: note = Any amino acid
  VARIANT 26: note = Any amino acid
  VARIANT 27: note = Any amino acid
  VARIANT 28: note = Any amino acid
  VARIANT 29: note = Any amino acid
  VARIANT 30: note = Any amino acid
  VARIANT 31: note = Any amino acid
  VARIANT 32: note = Any amino acid
  VARIANT 33: note = Any amino acid
  VARIANT 34: note = Any amino acid
  VARIANT 35: note = Any amino acid
  VARIANT 36: note = Any amino acid
  VARIANT 37: note = Any amino acid
  VARIANT 38: note = Any amino acid
  VARIANT 39: note = Any amino acid
  VARIANT 40: note = Any amino acid
  VARIANT 41: note = Any amino acid
  VARIANT 42: note = Any amino acid
  VARIANT 43: note = Any amino acid
  VARIANT 44: note = Any amino acid
  VARIANT 45: note = Any amino acid
  VARIANT 46: note = Any amino acid
  VARIANT 47: note = Any amino acid
  VARIANT 49: note = Any amino acid
  VARIANT 50: note = Any amino acid
  VARIANT 51: note = Any amino acid
  VARIANT 52: note = Any amino acid
  VARIANT 53: note = Any amino acid
  VARIANT 54: note = Any amino acid
  VARIANT 55: note = Any amino acid
  VARIANT 56: note = Any amino acid
  VARIANT 57: note = Any amino acid
  VARIANT 58: note = Any amino acid
  VARIANT 59: note = Any amino acid
  VARIANT 60: note = Any amino acid
  VARIANT 61: note = Any amino acid
  VARIANT 62: note = Any amino acid
  VARIANT 63: note = Any amino acid
  VARIANT 64: note = Any amino acid
  VARIANT 65: note = Any amino acid
  VARIANT 66: note = Any amino acid
  VARIANT 67: note = Any amino acid
  VARIANT 68: note = Any amino acid
  VARIANT 69: note = Any amino acid
  VARIANT 70: note = Any amino acid
  VARIANT 71: note = Any amino acid
  VARIANT 72: note = Any amino acid
  VARIANT 73: note = Any amino acid
  VARIANT 74: note = Any amino acid
  VARIANT 75: note = Any amino acid
  VARIANT 76: note = Any amino acid
  VARIANT 77: note = Any amino acid
  VARIANT 78: note = Any amino acid
  VARIANT 79: note = Any amino acid
  VARIANT 80: note = Any amino acid
  VARIANT 81: note = Any amino acid
  VARIANT 82: note = Any amino acid
  VARIANT 83: note = Any amino acid
  VARIANT 84: note = Any amino acid
  VARIANT 85: note = Any amino acid
  VARIANT 87: note = Any amino acid
  VARIANT 89: note = Any amino acid
  VARIANT 90: note = Any amino acid
DXXXXXXXXXXXXXXXXXXXXXXXXXXXXXXXXXXXXXXXXXXXXXXEXXXXXXXXXXXXXXXXXXXXXXXXXXXXXXXXXXXXXKXDXXD

SEQ ID NO: 795646 - protein, 94 aa, unidentified
  VARIANT 2: note = Any amino acid
  VARIANT 3: note = Any amino acid
  VARIANT 4: note = Any amino acid
  VARIANT 5: note = Any amino acid
  VARIANT 6: note = Any amino acid
  VARIANT 7: note = Any amino acid
  VARIANT 8: note = Any amino acid
  VARIANT 9: note = Any amino acid
  VARIANT 10: note = Any amino acid
  VARIANT 11: note = Any amino acid
  VARIANT 12: note = Any amino acid
  VARIANT 13: note = Any amino acid
  VARIANT 14: note = Any amino acid
  VARIANT 15: note = Any amino acid
  VARIANT 16: note = Any amino acid
  VARIANT 17: note = Any amino acid
  VARIANT 18: note = Any amino acid
  VARIANT 19: note = Any amino acid
  VARIANT 20: note = Any amino acid
  VARIANT 21: note = Any amino acid
  VARIANT 22: note = Any amino acid
  VARIANT 23: note = Any amino acid
  VARIANT 24: note = Any amino acid
  VARIANT 25: note = Any amino acid
  VARIANT 26: note = Any amino acid
  VARIANT 27: note = Any amino acid
  VARIANT 28: note = Any amino acid
  VARIANT 29: note = Any amino acid
  VARIANT 30: note = Any amino acid
  VARIANT 31: note = Any amino acid
  VARIANT 32: note = Any amino acid
  VARIANT 33: note = Any amino acid
  VARIANT 34: note = Any amino acid
  VARIANT 35: note = Any amino acid
  VARIANT 36: note = Any amino acid
  VARIANT 37: note = Any amino acid
  VARIANT 38: note = Any amino acid
  VARIANT 39: note = Any amino acid
  VARIANT 40: note = Any amino acid
  VARIANT 41: note = Any amino acid
  VARIANT 42: note = Any amino acid
  VARIANT 43: note = Any amino acid
  VARIANT 44: note = Any amino acid
  VARIANT 45: note = Any amino acid
  VARIANT 46: note = Any amino acid
  VARIANT 47: note = Any amino acid
  VARIANT 49: note = Any amino acid
  VARIANT 50: note = Any amino acid
  VARIANT 51: note = Any amino acid
  VARIANT 52: note = Any amino acid
  VARIANT 53: note = Any amino acid
  VARIANT 54: note = Any amino acid
  VARIANT 55: note = Any amino acid
  VARIANT 56: note = Any amino acid
  VARIANT 57: note = Any amino acid
  VARIANT 58: note = Any amino acid
  VARIANT 59: note = Any amino acid
  VARIANT 60: note = Any amino acid
  VARIANT 61: note = Any amino acid
  VARIANT 62: note = Any amino acid
  VARIANT 63: note = Any amino acid
  VARIANT 64: note = Any amino acid
  VARIANT 65: note = Any amino acid
  VARIANT 66: note = Any amino acid
  VARIANT 67: note = Any amino acid
  VARIANT 68: note = Any amino acid
  VARIANT 69: note = Any amino acid
  VARIANT 70: note = Any amino acid
  VARIANT 71: note = Any amino acid
  VARIANT 72: note = Any amino acid
  VARIANT 73: note = Any amino acid
  VARIANT 74: note = Any amino acid
  VARIANT 75: note = Any amino acid
  VARIANT 76: note = Any amino acid
  VARIANT 77: note = Any amino acid
  VARIANT 78: note = Any amino acid
  VARIANT 79: note = Any amino acid
  VARIANT 80: note = Any amino acid
  VARIANT 81: note = Any amino acid
  VARIANT 82: note = Any amino acid
  VARIANT 83: note = Any amino acid
  VARIANT 84: note = Any amino acid
  VARIANT 85: note = Any amino acid
  VARIANT 86: note = Any amino acid
  VARIANT 87: note = Any amino acid
  VARIANT 88: note = Any amino acid
  VARIANT 90: note = Any amino acid
  VARIANT 92: note = Any amino acid
  VARIANT 93: note = Any amino acid
DXXXXXXXXXXXXXXXXXXXXXXXXXXXXXXXXXXXXXXXXXXXXXXEXXXXXXXXXXXXXXXXXXXXXXXXXXXXXXXXXXXXXXXXKXDXXD

SEQ ID NO: 795647 - protein, 97 aa, unidentified
  VARIANT 2: note = Any amino acid
  VARIANT 3: note = Any amino acid
  VARIANT 4: note = Any amino acid
  VARIANT 5: note = Any amino acid
  VARIANT 6: note = Any amino acid
  VARIANT 7: note = Any amino acid
  VARIANT 8: note = Any amino acid
  VARIANT 9: note = Any amino acid
  VARIANT 10: note = Any amino acid
  VARIANT 11: note = Any amino acid
  VARIANT 12: note = Any amino acid
  VARIANT 13: note = Any amino acid
  VARIANT 14: note = Any amino acid
  VARIANT 15: note = Any amino acid
  VARIANT 16: note = Any amino acid
  VARIANT 17: note = Any amino acid
  VARIANT 18: note = Any amino acid
  VARIANT 19: note = Any amino acid
  VARIANT 20: note = Any amino acid
  VARIANT 21: note = Any amino acid
  VARIANT 22: note = Any amino acid
  VARIANT 23: note = Any amino acid
  VARIANT 24: note = Any amino acid
  VARIANT 25: note = Any amino acid
  VARIANT 26: note = Any amino acid
  VARIANT 27: note = Any amino acid
  VARIANT 28: note = Any amino acid
  VARIANT 29: note = Any amino acid
  VARIANT 30: note = Any amino acid
  VARIANT 31: note = Any amino acid
  VARIANT 32: note = Any amino acid
  VARIANT 33: note = Any amino acid
  VARIANT 34: note = Any amino acid
  VARIANT 35: note = Any amino acid
  VARIANT 36: note = Any amino acid
  VARIANT 37: note = Any amino acid
  VARIANT 38: note = Any amino acid
  VARIANT 39: note = Any amino acid
  VARIANT 40: note = Any amino acid
  VARIANT 41: note = Any amino acid
  VARIANT 42: note = Any amino acid
  VARIANT 43: note = Any amino acid
  VARIANT 44: note = Any amino acid
  VARIANT 45: note = Any amino acid
  VARIANT 46: note = Any amino acid
  VARIANT 47: note = Any amino acid
  VARIANT 48: note = Any amino acid
  VARIANT 49: note = Any amino acid
  VARIANT 50: note = Any amino acid
  VARIANT 51: note = Any amino acid
  VARIANT 53: note = Any amino acid
  VARIANT 54: note = Any amino acid
  VARIANT 55: note = Any amino acid
  VARIANT 56: note = Any amino acid
  VARIANT 57: note = Any amino acid
  VARIANT 58: note = Any amino acid
  VARIANT 59: note = Any amino acid
  VARIANT 60: note = Any amino acid
  VARIANT 61: note = Any amino acid
  VARIANT 62: note = Any amino acid
  VARIANT 63: note = Any amino acid
  VARIANT 64: note = Any amino acid
  VARIANT 65: note = Any amino acid
  VARIANT 66: note = Any amino acid
  VARIANT 67: note = Any amino acid
  VARIANT 68: note = Any amino acid
  VARIANT 69: note = Any amino acid
  VARIANT 70: note = Any amino acid
  VARIANT 71: note = Any amino acid
  VARIANT 72: note = Any amino acid
  VARIANT 73: note = Any amino acid
  VARIANT 74: note = Any amino acid
  VARIANT 75: note = Any amino acid
  VARIANT 76: note = Any amino acid
  VARIANT 77: note = Any amino acid
  VARIANT 78: note = Any amino acid
  VARIANT 79: note = Any amino acid
  VARIANT 80: note = Any amino acid
  VARIANT 81: note = Any amino acid
  VARIANT 82: note = Any amino acid
  VARIANT 83: note = Any amino acid
  VARIANT 84: note = Any amino acid
  VARIANT 85: note = Any amino acid
  VARIANT 86: note = Any amino acid
  VARIANT 87: note = Any amino acid
  VARIANT 88: note = Any amino acid
  VARIANT 89: note = Any amino acid
  VARIANT 90: note = Any amino acid
  VARIANT 91: note = Any amino acid
  VARIANT 93: note = Any amino acid
  VARIANT 95: note = Any amino acid
  VARIANT 96: note = Any amino acid
DXXXXXXXXXXXXXXXXXXXXXXXXXXXXXXXXXXXXXXXXXXXXXXXXXXGXXXXXXXXXXXXXXXXXXXXXXXXXXXXXXXXXXXXXXXKXDXXD

SEQ ID NO: 795648 - protein, 96 aa, unidentified
  VARIANT 2: note = Any amino acid
  VARIANT 3: note = Any amino acid
  VARIANT 4: note = Any amino acid
  VARIANT 5: note = Any amino acid
  VARIANT 6: note = Any amino acid
  VARIANT 7: note = Any amino acid
  VARIANT 8: note = Any amino acid
  VARIANT 9: note = Any amino acid
  VARIANT 10: note = Any amino acid
  VARIANT 11: note = Any amino acid
  VARIANT 12: note = Any amino acid
  VARIANT 13: note = Any amino acid
  VARIANT 14: note = Any amino acid
  VARIANT 15: note = Any amino acid
  VARIANT 16: note = Any amino acid
  VARIANT 17: note = Any amino acid
  VARIANT 18: note = Any amino acid
  VARIANT 19: note = Any amino acid
  VARIANT 20: note = Any amino acid
  VARIANT 21: note = Any amino acid
  VARIANT 22: note = Any amino acid
  VARIANT 23: note = Any amino acid
  VARIANT 24: note = Any amino acid
  VARIANT 25: note = Any amino acid
  VARIANT 26: note = Any amino acid
  VARIANT 27: note = Any amino acid
  VARIANT 28: note = Any amino acid
  VARIANT 29: note = Any amino acid
  VARIANT 30: note = Any amino acid
  VARIANT 31: note = Any amino acid
  VARIANT 32: note = Any amino acid
  VARIANT 33: note = Any amino acid
  VARIANT 34: note = Any amino acid
  VARIANT 35: note = Any amino acid
  VARIANT 36: note = Any amino acid
  VARIANT 37: note = Any amino acid
  VARIANT 38: note = Any amino acid
  VARIANT 39: note = Any amino acid
  VARIANT 40: note = Any amino acid
  VARIANT 41: note = Any amino acid
  VARIANT 42: note = Any amino acid
  VARIANT 43: note = Any amino acid
  VARIANT 44: note = Any amino acid
  VARIANT 45: note = Any amino acid
  VARIANT 46: note = Any amino acid
  VARIANT 47: note = Any amino acid
  VARIANT 48: note = Any amino acid
  VARIANT 49: note = Any amino acid
  VARIANT 51: note = Any amino acid
  VARIANT 52: note = Any amino acid
  VARIANT 53: note = Any amino acid
  VARIANT 54: note = Any amino acid
  VARIANT 55: note = Any amino acid
  VARIANT 56: note = Any amino acid
  VARIANT 57: note = Any amino acid
  VARIANT 58: note = Any amino acid
  VARIANT 59: note = Any amino acid
  VARIANT 60: note = Any amino acid
  VARIANT 61: note = Any amino acid
  VARIANT 62: note = Any amino acid
  VARIANT 63: note = Any amino acid
  VARIANT 64: note = Any amino acid
  VARIANT 65: note = Any amino acid
  VARIANT 66: note = Any amino acid
  VARIANT 67: note = Any amino acid
  VARIANT 68: note = Any amino acid
  VARIANT 69: note = Any amino acid
  VARIANT 70: note = Any amino acid
  VARIANT 71: note = Any amino acid
  VARIANT 72: note = Any amino acid
  VARIANT 73: note = Any amino acid
  VARIANT 74: note = Any amino acid
  VARIANT 75: note = Any amino acid
  VARIANT 76: note = Any amino acid
  VARIANT 77: note = Any amino acid
  VARIANT 78: note = Any amino acid
  VARIANT 79: note = Any amino acid
  VARIANT 80: note = Any amino acid
  VARIANT 81: note = Any amino acid
  VARIANT 82: note = Any amino acid
  VARIANT 83: note = Any amino acid
  VARIANT 84: note = Any amino acid
  VARIANT 85: note = Any amino acid
  VARIANT 86: note = Any amino acid
  VARIANT 87: note = Any amino acid
  VARIANT 88: note = Any amino acid
  VARIANT 89: note = Any amino acid
  VARIANT 90: note = Any amino acid
  VARIANT 92: note = Any amino acid
  VARIANT 94: note = Any amino acid
  VARIANT 95: note = Any amino acid
DXXXXXXXXXXXXXXXXXXXXXXXXXXXXXXXXXXXXXXXXXXXXXXXXDXXXXXXXXXXXXXXXXXXXXXXXXXXXXXXXXXXXXXXXXKXDXXD

SEQ ID NO: 795649 - protein, 102 aa, unidentified
  VARIANT 2: note = Any amino acid
  VARIANT 3: note = Any amino acid
  VARIANT 4: note = Any amino acid
  VARIANT 5: note = Any amino acid
  VARIANT 6: note = Any amino acid
  VARIANT 7: note = Any amino acid
  VARIANT 8: note = Any amino acid
  VARIANT 9: note = Any amino acid
  VARIANT 10: note = Any amino acid
  VARIANT 11: note = Any amino acid
  VARIANT 12: note = Any amino acid
  VARIANT 13: note = Any amino acid
  VARIANT 14: note = Any amino acid
  VARIANT 15: note = Any amino acid
  VARIANT 16: note = Any amino acid
  VARIANT 17: note = Any amino acid
  VARIANT 18: note = Any amino acid
  VARIANT 19: note = Any amino acid
  VARIANT 20: note = Any amino acid
  VARIANT 21: note = Any amino acid
  VARIANT 22: note = Any amino acid
  VARIANT 23: note = Any amino acid
  VARIANT 24: note = Any amino acid
  VARIANT 25: note = Any amino acid
  VARIANT 26: note = Any amino acid
  VARIANT 27: note = Any amino acid
  VARIANT 28: note = Any amino acid
  VARIANT 29: note = Any amino acid
  VARIANT 30: note = Any amino acid
  VARIANT 31: note = Any amino acid
  VARIANT 32: note = Any amino acid
  VARIANT 33: note = Any amino acid
  VARIANT 34: note = Any amino acid
  VARIANT 35: note = Any amino acid
  VARIANT 36: note = Any amino acid
  VARIANT 37: note = Any amino acid
  VARIANT 38: note = Any amino acid
  VARIANT 39: note = Any amino acid
  VARIANT 40: note = Any amino acid
  VARIANT 41: note = Any amino acid
  VARIANT 42: note = Any amino acid
  VARIANT 43: note = Any amino acid
  VARIANT 44: note = Any amino acid
  VARIANT 45: note = Any amino acid
  VARIANT 46: note = Any amino acid
  VARIANT 47: note = Any amino acid
  VARIANT 48: note = Any amino acid
  VARIANT 49: note = Any amino acid
  VARIANT 50: note = Any amino acid
  VARIANT 51: note = Any amino acid
  VARIANT 52: note = Any amino acid
  VARIANT 53: note = Any amino acid
  VARIANT 54: note = Any amino acid
  VARIANT 55: note = Any amino acid
  VARIANT 56: note = Any amino acid
  VARIANT 58: note = Any amino acid
  VARIANT 59: note = Any amino acid
  VARIANT 60: note = Any amino acid
  VARIANT 61: note = Any amino acid
  VARIANT 62: note = Any amino acid
  VARIANT 63: note = Any amino acid
  VARIANT 64: note = Any amino acid
  VARIANT 65: note = Any amino acid
  VARIANT 66: note = Any amino acid
  VARIANT 67: note = Any amino acid
  VARIANT 68: note = Any amino acid
  VARIANT 69: note = Any amino acid
  VARIANT 70: note = Any amino acid
  VARIANT 71: note = Any amino acid
  VARIANT 72: note = Any amino acid
  VARIANT 73: note = Any amino acid
  VARIANT 74: note = Any amino acid
  VARIANT 75: note = Any amino acid
  VARIANT 76: note = Any amino acid
  VARIANT 77: note = Any amino acid
  VARIANT 78: note = Any amino acid
  VARIANT 79: note = Any amino acid
  VARIANT 80: note = Any amino acid
  VARIANT 81: note = Any amino acid
  VARIANT 82: note = Any amino acid
  VARIANT 83: note = Any amino acid
  VARIANT 84: note = Any amino acid
  VARIANT 85: note = Any amino acid
  VARIANT 86: note = Any amino acid
  VARIANT 87: note = Any amino acid
  VARIANT 88: note = Any amino acid
  VARIANT 89: note = Any amino acid
  VARIANT 90: note = Any amino acid
  VARIANT 91: note = Any amino acid
  VARIANT 92: note = Any amino acid
  VARIANT 93: note = Any amino acid
  VARIANT 94: note = Any amino acid
  VARIANT 95: note = Any amino acid
  VARIANT 96: note = Any amino acid
  VARIANT 98: note = Any amino acid
  VARIANT 100: note = Any amino acid
  VARIANT 101: note = Any amino acid
DXXXXXXXXXXXXXXXXXXXXXXXXXXXXXXXXXXXXXXXXXXXXXXXXXXXXXXXEXXXXXXXXXXXXXXXXXXXXXXXXXXXXXXXXXXXXXXXVXDXXA

SEQ ID NO: 795650 - protein, 99 aa, unidentified
  VARIANT 2: note = Any amino acid
  VARIANT 3: note = Any amino acid
  VARIANT 4: note = Any amino acid
  VARIANT 5: note = Any amino acid
  VARIANT 6: note = Any amino acid
  VARIANT 7: note = Any amino acid
  VARIANT 8: note = Any amino acid
  VARIANT 9: note = Any amino acid
  VARIANT 10: note = Any amino acid
  VARIANT 11: note = Any amino acid
  VARIANT 12: note = Any amino acid
  VARIANT 13: note = Any amino acid
  VARIANT 14: note = Any amino acid
  VARIANT 15: note = Any amino acid
  VARIANT 16: note = Any amino acid
  VARIANT 17: note = Any amino acid
  VARIANT 18: note = Any amino acid
  VARIANT 19: note = Any amino acid
  VARIANT 20: note = Any amino acid
  VARIANT 21: note = Any amino acid
  VARIANT 22: note = Any amino acid
  VARIANT 23: note = Any amino acid
  VARIANT 24: note = Any amino acid
  VARIANT 25: note = Any amino acid
  VARIANT 26: note = Any amino acid
  VARIANT 27: note = Any amino acid
  VARIANT 28: note = Any amino acid
  VARIANT 29: note = Any amino acid
  VARIANT 30: note = Any amino acid
  VARIANT 31: note = Any amino acid
  VARIANT 32: note = Any amino acid
  VARIANT 33: note = Any amino acid
  VARIANT 34: note = Any amino acid
  VARIANT 35: note = Any amino acid
  VARIANT 36: note = Any amino acid
  VARIANT 37: note = Any amino acid
  VARIANT 38: note = Any amino acid
  VARIANT 39: note = Any amino acid
  VARIANT 40: note = Any amino acid
  VARIANT 41: note = Any amino acid
  VARIANT 42: note = Any amino acid
  VARIANT 43: note = Any amino acid
  VARIANT 44: note = Any amino acid
  VARIANT 45: note = Any amino acid
  VARIANT 46: note = Any amino acid
  VARIANT 47: note = Any amino acid
  VARIANT 48: note = Any amino acid
  VARIANT 49: note = Any amino acid
  VARIANT 50: note = Any amino acid
  VARIANT 51: note = Any amino acid
  VARIANT 52: note = Any amino acid
  VARIANT 53: note = Any amino acid
  VARIANT 55: note = Any amino acid
  VARIANT 56: note = Any amino acid
  VARIANT 57: note = Any amino acid
  VARIANT 58: note = Any amino acid
  VARIANT 59: note = Any amino acid
  VARIANT 60: note = Any amino acid
  VARIANT 61: note = Any amino acid
  VARIANT 62: note = Any amino acid
  VARIANT 63: note = Any amino acid
  VARIANT 64: note = Any amino acid
  VARIANT 65: note = Any amino acid
  VARIANT 66: note = Any amino acid
  VARIANT 67: note = Any amino acid
  VARIANT 68: note = Any amino acid
  VARIANT 69: note = Any amino acid
  VARIANT 70: note = Any amino acid
  VARIANT 71: note = Any amino acid
  VARIANT 72: note = Any amino acid
  VARIANT 73: note = Any amino acid
  VARIANT 74: note = Any amino acid
  VARIANT 75: note = Any amino acid
  VARIANT 76: note = Any amino acid
  VARIANT 77: note = Any amino acid
  VARIANT 78: note = Any amino acid
  VARIANT 79: note = Any amino acid
  VARIANT 80: note = Any amino acid
  VARIANT 81: note = Any amino acid
  VARIANT 82: note = Any amino acid
  VARIANT 83: note = Any amino acid
  VARIANT 84: note = Any amino acid
  VARIANT 85: note = Any amino acid
  VARIANT 86: note = Any amino acid
  VARIANT 87: note = Any amino acid
  VARIANT 88: note = Any amino acid
  VARIANT 89: note = Any amino acid
  VARIANT 90: note = Any amino acid
  VARIANT 91: note = Any amino acid
  VARIANT 92: note = Any amino acid
  VARIANT 93: note = Any amino acid
  VARIANT 95: note = Any amino acid
  VARIANT 97: note = Any amino acid
  VARIANT 98: note = Any amino acid
DXXXXXXXXXXXXXXXXXXXXXXXXXXXXXXXXXXXXXXXXXXXXXXXXXXXXEXXXXXXXXXXXXXXXXXXXXXXXXXXXXXXXXXXXXXXXKXNXXD

SEQ ID NO: 795651 - protein, 105 aa, unidentified
  VARIANT 2: note = Any amino acid
  VARIANT 3: note = Any amino acid
  VARIANT 4: note = Any amino acid
  VARIANT 5: note = Any amino acid
  VARIANT 6: note = Any amino acid
  VARIANT 7: note = Any amino acid
  VARIANT 8: note = Any amino acid
  VARIANT 9: note = Any amino acid
  VARIANT 10: note = Any amino acid
  VARIANT 11: note = Any amino acid
  VARIANT 12: note = Any amino acid
  VARIANT 13: note = Any amino acid
  VARIANT 14: note = Any amino acid
  VARIANT 15: note = Any amino acid
  VARIANT 16: note = Any amino acid
  VARIANT 17: note = Any amino acid
  VARIANT 18: note = Any amino acid
  VARIANT 19: note = Any amino acid
  VARIANT 20: note = Any amino acid
  VARIANT 21: note = Any amino acid
  VARIANT 22: note = Any amino acid
  VARIANT 23: note = Any amino acid
  VARIANT 24: note = Any amino acid
  VARIANT 25: note = Any amino acid
  VARIANT 26: note = Any amino acid
  VARIANT 27: note = Any amino acid
  VARIANT 28: note = Any amino acid
  VARIANT 29: note = Any amino acid
  VARIANT 30: note = Any amino acid
  VARIANT 31: note = Any amino acid
  VARIANT 32: note = Any amino acid
  VARIANT 33: note = Any amino acid
  VARIANT 34: note = Any amino acid
  VARIANT 35: note = Any amino acid
  VARIANT 36: note = Any amino acid
  VARIANT 37: note = Any amino acid
  VARIANT 38: note = Any amino acid
  VARIANT 39: note = Any amino acid
  VARIANT 40: note = Any amino acid
  VARIANT 41: note = Any amino acid
  VARIANT 42: note = Any amino acid
  VARIANT 43: note = Any amino acid
  VARIANT 44: note = Any amino acid
  VARIANT 45: note = Any amino acid
  VARIANT 46: note = Any amino acid
  VARIANT 47: note = Any amino acid
  VARIANT 48: note = Any amino acid
  VARIANT 49: note = Any amino acid
  VARIANT 50: note = Any amino acid
  VARIANT 51: note = Any amino acid
  VARIANT 52: note = Any amino acid
  VARIANT 53: note = Any amino acid
  VARIANT 54: note = Any amino acid
  VARIANT 55: note = Any amino acid
  VARIANT 57: note = Any amino acid
  VARIANT 58: note = Any amino acid
  VARIANT 59: note = Any amino acid
  VARIANT 60: note = Any amino acid
  VARIANT 61: note = Any amino acid
  VARIANT 62: note = Any amino acid
  VARIANT 63: note = Any amino acid
  VARIANT 64: note = Any amino acid
  VARIANT 65: note = Any amino acid
  VARIANT 66: note = Any amino acid
  VARIANT 67: note = Any amino acid
  VARIANT 68: note = Any amino acid
  VARIANT 69: note = Any amino acid
  VARIANT 70: note = Any amino acid
  VARIANT 71: note = Any amino acid
  VARIANT 72: note = Any amino acid
  VARIANT 73: note = Any amino acid
  VARIANT 74: note = Any amino acid
  VARIANT 75: note = Any amino acid
  VARIANT 76: note = Any amino acid
  VARIANT 77: note = Any amino acid
  VARIANT 78: note = Any amino acid
  VARIANT 79: note = Any amino acid
  VARIANT 80: note = Any amino acid
  VARIANT 81: note = Any amino acid
  VARIANT 82: note = Any amino acid
  VARIANT 83: note = Any amino acid
  VARIANT 84: note = Any amino acid
  VARIANT 85: note = Any amino acid
  VARIANT 86: note = Any amino acid
  VARIANT 87: note = Any amino acid
  VARIANT 88: note = Any amino acid
  VARIANT 89: note = Any amino acid
  VARIANT 90: note = Any amino acid
  VARIANT 91: note = Any amino acid
  VARIANT 92: note = Any amino acid
  VARIANT 93: note = Any amino acid
  VARIANT 94: note = Any amino acid
  VARIANT 95: note = Any amino acid
  VARIANT 96: note = Any amino acid
  VARIANT 97: note = Any amino acid
  VARIANT 98: note = Any amino acid
  VARIANT 99: note = Any amino acid
  VARIANT 101: note = Any amino acid
  VARIANT 103: note = Any amino acid
  VARIANT 104: note = Any amino acid
DXXXXXXXXXXXXXXXXXXXXXXXXXXXXXXXXXXXXXXXXXXXXXXXXXXXXXXEXXXXXXXXXXXXXXXXXXXXXXXXXXXXXXXXXXXXXXXXXXXIXDXXS

SEQ ID NO: 795652 - protein, 93 aa, unidentified
  VARIANT 2: note = Any amino acid
  VARIANT 3: note = Any amino acid
  VARIANT 4: note = Any amino acid
  VARIANT 5: note = Any amino acid
  VARIANT 6: note = Any amino acid
  VARIANT 7: note = Any amino acid
  VARIANT 8: note = Any amino acid
  VARIANT 9: note = Any amino acid
  VARIANT 10: note = Any amino acid
  VARIANT 11: note = Any amino acid
  VARIANT 12: note = Any amino acid
  VARIANT 13: note = Any amino acid
  VARIANT 14: note = Any amino acid
  VARIANT 15: note = Any amino acid
  VARIANT 16: note = Any amino acid
  VARIANT 17: note = Any amino acid
  VARIANT 18: note = Any amino acid
  VARIANT 19: note = Any amino acid
  VARIANT 20: note = Any amino acid
  VARIANT 21: note = Any amino acid
  VARIANT 22: note = Any amino acid
  VARIANT 23: note = Any amino acid
  VARIANT 24: note = Any amino acid
  VARIANT 25: note = Any amino acid
  VARIANT 26: note = Any amino acid
  VARIANT 27: note = Any amino acid
  VARIANT 28: note = Any amino acid
  VARIANT 29: note = Any amino acid
  VARIANT 30: note = Any amino acid
  VARIANT 31: note = Any amino acid
  VARIANT 32: note = Any amino acid
  VARIANT 33: note = Any amino acid
  VARIANT 34: note = Any amino acid
  VARIANT 35: note = Any amino acid
  VARIANT 36: note = Any amino acid
  VARIANT 37: note = Any amino acid
  VARIANT 38: note = Any amino acid
  VARIANT 39: note = Any amino acid
  VARIANT 40: note = Any amino acid
  VARIANT 41: note = Any amino acid
  VARIANT 42: note = Any amino acid
  VARIANT 43: note = Any amino acid
  VARIANT 44: note = Any amino acid
  VARIANT 45: note = Any amino acid
  VARIANT 46: note = Any amino acid
  VARIANT 47: note = Any amino acid
  VARIANT 48: note = Any amino acid
  VARIANT 50: note = Any amino acid
  VARIANT 51: note = Any amino acid
  VARIANT 52: note = Any amino acid
  VARIANT 53: note = Any amino acid
  VARIANT 54: note = Any amino acid
  VARIANT 55: note = Any amino acid
  VARIANT 56: note = Any amino acid
  VARIANT 57: note = Any amino acid
  VARIANT 58: note = Any amino acid
  VARIANT 59: note = Any amino acid
  VARIANT 60: note = Any amino acid
  VARIANT 61: note = Any amino acid
  VARIANT 62: note = Any amino acid
  VARIANT 63: note = Any amino acid
  VARIANT 64: note = Any amino acid
  VARIANT 65: note = Any amino acid
  VARIANT 66: note = Any amino acid
  VARIANT 67: note = Any amino acid
  VARIANT 68: note = Any amino acid
  VARIANT 69: note = Any amino acid
  VARIANT 70: note = Any amino acid
  VARIANT 71: note = Any amino acid
  VARIANT 72: note = Any amino acid
  VARIANT 73: note = Any amino acid
  VARIANT 74: note = Any amino acid
  VARIANT 75: note = Any amino acid
  VARIANT 76: note = Any amino acid
  VARIANT 77: note = Any amino acid
  VARIANT 78: note = Any amino acid
  VARIANT 79: note = Any amino acid
  VARIANT 80: note = Any amino acid
  VARIANT 81: note = Any amino acid
  VARIANT 82: note = Any amino acid
  VARIANT 83: note = Any amino acid
  VARIANT 84: note = Any amino acid
  VARIANT 85: note = Any amino acid
  VARIANT 86: note = Any amino acid
  VARIANT 87: note = Any amino acid
  VARIANT 89: note = Any amino acid
  VARIANT 91: note = Any amino acid
  VARIANT 92: note = Any amino acid
DXXXXXXXXXXXXXXXXXXXXXXXXXXXXXXXXXXXXXXXXXXXXXXXEXXXXXXXXXXXXXXXXXXXXXXXXXXXXXXXXXXXXXXKXDXXD

SEQ ID NO: 795653 - protein, 88 aa, unidentified
  VARIANT 2: note = Any amino acid
  VARIANT 3: note = Any amino acid
  VARIANT 4: note = Any amino acid
  VARIANT 5: note = Any amino acid
  VARIANT 6: note = Any amino acid
  VARIANT 7: note = Any amino acid
  VARIANT 8: note = Any amino acid
  VARIANT 9: note = Any amino acid
  VARIANT 10: note = Any amino acid
  VARIANT 11: note = Any amino acid
  VARIANT 12: note = Any amino acid
  VARIANT 13: note = Any amino acid
  VARIANT 14: note = Any amino acid
  VARIANT 15: note = Any amino acid
  VARIANT 16: note = Any amino acid
  VARIANT 17: note = Any amino acid
  VARIANT 18: note = Any amino acid
  VARIANT 19: note = Any amino acid
  VARIANT 20: note = Any amino acid
  VARIANT 21: note = Any amino acid
  VARIANT 22: note = Any amino acid
  VARIANT 23: note = Any amino acid
  VARIANT 24: note = Any amino acid
  VARIANT 25: note = Any amino acid
  VARIANT 26: note = Any amino acid
  VARIANT 27: note = Any amino acid
  VARIANT 28: note = Any amino acid
  VARIANT 29: note = Any amino acid
  VARIANT 30: note = Any amino acid
  VARIANT 31: note = Any amino acid
  VARIANT 32: note = Any amino acid
  VARIANT 33: note = Any amino acid
  VARIANT 34: note = Any amino acid
  VARIANT 35: note = Any amino acid
  VARIANT 36: note = Any amino acid
  VARIANT 37: note = Any amino acid
  VARIANT 38: note = Any amino acid
  VARIANT 39: note = Any amino acid
  VARIANT 40: note = Any amino acid
  VARIANT 41: note = Any amino acid
  VARIANT 42: note = Any amino acid
  VARIANT 43: note = Any amino acid
  VARIANT 44: note = Any amino acid
  VARIANT 45: note = Any amino acid
  VARIANT 46: note = Any amino acid
  VARIANT 47: note = Any amino acid
  VARIANT 48: note = Any amino acid
  VARIANT 50: note = Any amino acid
  VARIANT 51: note = Any amino acid
  VARIANT 52: note = Any amino acid
  VARIANT 53: note = Any amino acid
  VARIANT 54: note = Any amino acid
  VARIANT 55: note = Any amino acid
  VARIANT 56: note = Any amino acid
  VARIANT 57: note = Any amino acid
  VARIANT 58: note = Any amino acid
  VARIANT 59: note = Any amino acid
  VARIANT 60: note = Any amino acid
  VARIANT 61: note = Any amino acid
  VARIANT 62: note = Any amino acid
  VARIANT 63: note = Any amino acid
  VARIANT 64: note = Any amino acid
  VARIANT 65: note = Any amino acid
  VARIANT 66: note = Any amino acid
  VARIANT 67: note = Any amino acid
  VARIANT 68: note = Any amino acid
  VARIANT 69: note = Any amino acid
  VARIANT 70: note = Any amino acid
  VARIANT 71: note = Any amino acid
  VARIANT 72: note = Any amino acid
  VARIANT 73: note = Any amino acid
  VARIANT 74: note = Any amino acid
  VARIANT 75: note = Any amino acid
  VARIANT 76: note = Any amino acid
  VARIANT 77: note = Any amino acid
  VARIANT 78: note = Any amino acid
  VARIANT 79: note = Any amino acid
  VARIANT 80: note = Any amino acid
  VARIANT 81: note = Any amino acid
  VARIANT 82: note = Any amino acid
  VARIANT 84: note = Any amino acid
  VARIANT 86: note = Any amino acid
  VARIANT 87: note = Any amino acid
DXXXXXXXXXXXXXXXXXXXXXXXXXXXXXXXXXXXXXXXXXXXXXXXEXXXXXXXXXXXXXXXXXXXXXXXXXXXXXXXXXKXDXXD

SEQ ID NO: 795654 - protein, 99 aa, unidentified
  VARIANT 2: note = Any amino acid
  VARIANT 3: note = Any amino acid
  VARIANT 4: note = Any amino acid
  VARIANT 5: note = Any amino acid
  VARIANT 6: note = Any amino acid
  VARIANT 7: note = Any amino acid
  VARIANT 8: note = Any amino acid
  VARIANT 9: note = Any amino acid
  VARIANT 10: note = Any amino acid
  VARIANT 11: note = Any amino acid
  VARIANT 12: note = Any amino acid
  VARIANT 13: note = Any amino acid
  VARIANT 14: note = Any amino acid
  VARIANT 15: note = Any amino acid
  VARIANT 16: note = Any amino acid
  VARIANT 17: note = Any amino acid
  VARIANT 18: note = Any amino acid
  VARIANT 19: note = Any amino acid
  VARIANT 20: note = Any amino acid
  VARIANT 21: note = Any amino acid
  VARIANT 22: note = Any amino acid
  VARIANT 23: note = Any amino acid
  VARIANT 24: note = Any amino acid
  VARIANT 25: note = Any amino acid
  VARIANT 26: note = Any amino acid
  VARIANT 27: note = Any amino acid
  VARIANT 28: note = Any amino acid
  VARIANT 29: note = Any amino acid
  VARIANT 30: note = Any amino acid
  VARIANT 31: note = Any amino acid
  VARIANT 32: note = Any amino acid
  VARIANT 33: note = Any amino acid
  VARIANT 34: note = Any amino acid
  VARIANT 35: note = Any amino acid
  VARIANT 36: note = Any amino acid
  VARIANT 37: note = Any amino acid
  VARIANT 38: note = Any amino acid
  VARIANT 39: note = Any amino acid
  VARIANT 40: note = Any amino acid
  VARIANT 41: note = Any amino acid
  VARIANT 42: note = Any amino acid
  VARIANT 43: note = Any amino acid
  VARIANT 44: note = Any amino acid
  VARIANT 45: note = Any amino acid
  VARIANT 46: note = Any amino acid
  VARIANT 47: note = Any amino acid
  VARIANT 48: note = Any amino acid
  VARIANT 49: note = Any amino acid
  VARIANT 50: note = Any amino acid
  VARIANT 51: note = Any amino acid
  VARIANT 52: note = Any amino acid
  VARIANT 53: note = Any amino acid
  VARIANT 54: note = Any amino acid
  VARIANT 55: note = Any amino acid
  VARIANT 57: note = Any amino acid
  VARIANT 58: note = Any amino acid
  VARIANT 59: note = Any amino acid
  VARIANT 60: note = Any amino acid
  VARIANT 61: note = Any amino acid
  VARIANT 62: note = Any amino acid
  VARIANT 63: note = Any amino acid
  VARIANT 64: note = Any amino acid
  VARIANT 65: note = Any amino acid
  VARIANT 66: note = Any amino acid
  VARIANT 67: note = Any amino acid
  VARIANT 68: note = Any amino acid
  VARIANT 69: note = Any amino acid
  VARIANT 70: note = Any amino acid
  VARIANT 71: note = Any amino acid
  VARIANT 72: note = Any amino acid
  VARIANT 73: note = Any amino acid
  VARIANT 74: note = Any amino acid
  VARIANT 75: note = Any amino acid
  VARIANT 76: note = Any amino acid
  VARIANT 77: note = Any amino acid
  VARIANT 78: note = Any amino acid
  VARIANT 79: note = Any amino acid
  VARIANT 80: note = Any amino acid
  VARIANT 81: note = Any amino acid
  VARIANT 82: note = Any amino acid
  VARIANT 83: note = Any amino acid
  VARIANT 84: note = Any amino acid
  VARIANT 85: note = Any amino acid
  VARIANT 86: note = Any amino acid
  VARIANT 87: note = Any amino acid
  VARIANT 88: note = Any amino acid
  VARIANT 89: note = Any amino acid
  VARIANT 90: note = Any amino acid
  VARIANT 91: note = Any amino acid
  VARIANT 92: note = Any amino acid
  VARIANT 93: note = Any amino acid
  VARIANT 95: note = Any amino acid
  VARIANT 97: note = Any amino acid
  VARIANT 98: note = Any amino acid
DXXXXXXXXXXXXXXXXXXXXXXXXXXXXXXXXXXXXXXXXXXXXXXXXXXXXXXEXXXXXXXXXXXXXXXXXXXXXXXXXXXXXXXXXXXXXKXDXXD

SEQ ID NO: 795655 - protein, 98 aa, unidentified
  VARIANT 2: note = Any amino acid
  VARIANT 3: note = Any amino acid
  VARIANT 4: note = Any amino acid
  VARIANT 5: note = Any amino acid
  VARIANT 6: note = Any amino acid
  VARIANT 7: note = Any amino acid
  VARIANT 8: note = Any amino acid
  VARIANT 9: note = Any amino acid
  VARIANT 10: note = Any amino acid
  VARIANT 11: note = Any amino acid
  VARIANT 12: note = Any amino acid
  VARIANT 13: note = Any amino acid
  VARIANT 14: note = Any amino acid
  VARIANT 15: note = Any amino acid
  VARIANT 16: note = Any amino acid
  VARIANT 17: note = Any amino acid
  VARIANT 18: note = Any amino acid
  VARIANT 19: note = Any amino acid
  VARIANT 20: note = Any amino acid
  VARIANT 21: note = Any amino acid
  VARIANT 22: note = Any amino acid
  VARIANT 23: note = Any amino acid
  VARIANT 24: note = Any amino acid
  VARIANT 25: note = Any amino acid
  VARIANT 26: note = Any amino acid
  VARIANT 27: note = Any amino acid
  VARIANT 28: note = Any amino acid
  VARIANT 29: note = Any amino acid
  VARIANT 30: note = Any amino acid
  VARIANT 31: note = Any amino acid
  VARIANT 32: note = Any amino acid
  VARIANT 33: note = Any amino acid
  VARIANT 34: note = Any amino acid
  VARIANT 35: note = Any amino acid
  VARIANT 36: note = Any amino acid
  VARIANT 37: note = Any amino acid
  VARIANT 38: note = Any amino acid
  VARIANT 39: note = Any amino acid
  VARIANT 40: note = Any amino acid
  VARIANT 41: note = Any amino acid
  VARIANT 42: note = Any amino acid
  VARIANT 43: note = Any amino acid
  VARIANT 44: note = Any amino acid
  VARIANT 45: note = Any amino acid
  VARIANT 46: note = Any amino acid
  VARIANT 47: note = Any amino acid
  VARIANT 48: note = Any amino acid
  VARIANT 49: note = Any amino acid
  VARIANT 50: note = Any amino acid
  VARIANT 51: note = Any amino acid
  VARIANT 52: note = Any amino acid
  VARIANT 53: note = Any amino acid
  VARIANT 54: note = Any amino acid
  VARIANT 55: note = Any amino acid
  VARIANT 56: note = Any amino acid
  VARIANT 57: note = Any amino acid
  VARIANT 58: note = Any amino acid
  VARIANT 60: note = Any amino acid
  VARIANT 61: note = Any amino acid
  VARIANT 62: note = Any amino acid
  VARIANT 63: note = Any amino acid
  VARIANT 64: note = Any amino acid
  VARIANT 65: note = Any amino acid
  VARIANT 66: note = Any amino acid
  VARIANT 67: note = Any amino acid
  VARIANT 68: note = Any amino acid
  VARIANT 69: note = Any amino acid
  VARIANT 70: note = Any amino acid
  VARIANT 71: note = Any amino acid
  VARIANT 72: note = Any amino acid
  VARIANT 73: note = Any amino acid
  VARIANT 74: note = Any amino acid
  VARIANT 75: note = Any amino acid
  VARIANT 76: note = Any amino acid
  VARIANT 77: note = Any amino acid
  VARIANT 78: note = Any amino acid
  VARIANT 79: note = Any amino acid
  VARIANT 80: note = Any amino acid
  VARIANT 81: note = Any amino acid
  VARIANT 82: note = Any amino acid
  VARIANT 83: note = Any amino acid
  VARIANT 84: note = Any amino acid
  VARIANT 85: note = Any amino acid
  VARIANT 86: note = Any amino acid
  VARIANT 87: note = Any amino acid
  VARIANT 88: note = Any amino acid
  VARIANT 89: note = Any amino acid
  VARIANT 90: note = Any amino acid
  VARIANT 91: note = Any amino acid
  VARIANT 92: note = Any amino acid
  VARIANT 94: note = Any amino acid
  VARIANT 96: note = Any amino acid
  VARIANT 97: note = Any amino acid
DXXXXXXXXXXXXXXXXXXXXXXXXXXXXXXXXXXXXXXXXXXXXXXXXXXXXXXXXXEXXXXXXXXXXXXXXXXXXXXXXXXXXXXXXXXXKXDXXD

SEQ ID NO: 795656 - protein, 102 aa, unidentified
  VARIANT 2: note = Any amino acid
  VARIANT 3: note = Any amino acid
  VARIANT 4: note = Any amino acid
  VARIANT 5: note = Any amino acid
  VARIANT 6: note = Any amino acid
  VARIANT 7: note = Any amino acid
  VARIANT 8: note = Any amino acid
  VARIANT 9: note = Any amino acid
  VARIANT 10: note = Any amino acid
  VARIANT 11: note = Any amino acid
  VARIANT 12: note = Any amino acid
  VARIANT 13: note = Any amino acid
  VARIANT 14: note = Any amino acid
  VARIANT 15: note = Any amino acid
  VARIANT 16: note = Any amino acid
  VARIANT 17: note = Any amino acid
  VARIANT 18: note = Any amino acid
  VARIANT 19: note = Any amino acid
  VARIANT 20: note = Any amino acid
  VARIANT 21: note = Any amino acid
  VARIANT 22: note = Any amino acid
  VARIANT 23: note = Any amino acid
  VARIANT 24: note = Any amino acid
  VARIANT 25: note = Any amino acid
  VARIANT 26: note = Any amino acid
  VARIANT 27: note = Any amino acid
  VARIANT 28: note = Any amino acid
  VARIANT 29: note = Any amino acid
  VARIANT 30: note = Any amino acid
  VARIANT 31: note = Any amino acid
  VARIANT 32: note = Any amino acid
  VARIANT 33: note = Any amino acid
  VARIANT 34: note = Any amino acid
  VARIANT 35: note = Any amino acid
  VARIANT 36: note = Any amino acid
  VARIANT 37: note = Any amino acid
  VARIANT 38: note = Any amino acid
  VARIANT 39: note = Any amino acid
  VARIANT 40: note = Any amino acid
  VARIANT 41: note = Any amino acid
  VARIANT 42: note = Any amino acid
  VARIANT 43: note = Any amino acid
  VARIANT 44: note = Any amino acid
  VARIANT 45: note = Any amino acid
  VARIANT 46: note = Any amino acid
  VARIANT 47: note = Any amino acid
  VARIANT 48: note = Any amino acid
  VARIANT 49: note = Any amino acid
  VARIANT 50: note = Any amino acid
  VARIANT 51: note = Any amino acid
  VARIANT 52: note = Any amino acid
  VARIANT 53: note = Any amino acid
  VARIANT 54: note = Any amino acid
  VARIANT 55: note = Any amino acid
  VARIANT 56: note = Any amino acid
  VARIANT 57: note = Any amino acid
  VARIANT 58: note = Any amino acid
  VARIANT 60: note = Any amino acid
  VARIANT 61: note = Any amino acid
  VARIANT 62: note = Any amino acid
  VARIANT 63: note = Any amino acid
  VARIANT 64: note = Any amino acid
  VARIANT 65: note = Any amino acid
  VARIANT 66: note = Any amino acid
  VARIANT 67: note = Any amino acid
  VARIANT 68: note = Any amino acid
  VARIANT 69: note = Any amino acid
  VARIANT 70: note = Any amino acid
  VARIANT 71: note = Any amino acid
  VARIANT 72: note = Any amino acid
  VARIANT 73: note = Any amino acid
  VARIANT 74: note = Any amino acid
  VARIANT 75: note = Any amino acid
  VARIANT 76: note = Any amino acid
  VARIANT 77: note = Any amino acid
  VARIANT 78: note = Any amino acid
  VARIANT 79: note = Any amino acid
  VARIANT 80: note = Any amino acid
  VARIANT 81: note = Any amino acid
  VARIANT 82: note = Any amino acid
  VARIANT 83: note = Any amino acid
  VARIANT 84: note = Any amino acid
  VARIANT 85: note = Any amino acid
  VARIANT 86: note = Any amino acid
  VARIANT 87: note = Any amino acid
  VARIANT 88: note = Any amino acid
  VARIANT 89: note = Any amino acid
  VARIANT 90: note = Any amino acid
  VARIANT 91: note = Any amino acid
  VARIANT 92: note = Any amino acid
  VARIANT 93: note = Any amino acid
  VARIANT 94: note = Any amino acid
  VARIANT 95: note = Any amino acid
  VARIANT 96: note = Any amino acid
  VARIANT 98: note = Any amino acid
  VARIANT 100: note = Any amino acid
  VARIANT 101: note = Any amino acid
DXXXXXXXXXXXXXXXXXXXXXXXXXXXXXXXXXXXXXXXXXXXXXXXXXXXXXXXXXEXXXXXXXXXXXXXXXXXXXXXXXXXXXXXXXXXXXXXKXDXXD

SEQ ID NO: 795657 - protein, 100 aa, unidentified
  VARIANT 2: note = Any amino acid
  VARIANT 3: note = Any amino acid
  VARIANT 4: note = Any amino acid
  VARIANT 5: note = Any amino acid
  VARIANT 6: note = Any amino acid
  VARIANT 7: note = Any amino acid
  VARIANT 8: note = Any amino acid
  VARIANT 9: note = Any amino acid
  VARIANT 10: note = Any amino acid
  VARIANT 11: note = Any amino acid
  VARIANT 12: note = Any amino acid
  VARIANT 13: note = Any amino acid
  VARIANT 14: note = Any amino acid
  VARIANT 15: note = Any amino acid
  VARIANT 16: note = Any amino acid
  VARIANT 17: note = Any amino acid
  VARIANT 18: note = Any amino acid
  VARIANT 19: note = Any amino acid
  VARIANT 20: note = Any amino acid
  VARIANT 21: note = Any amino acid
  VARIANT 22: note = Any amino acid
  VARIANT 23: note = Any amino acid
  VARIANT 24: note = Any amino acid
  VARIANT 25: note = Any amino acid
  VARIANT 26: note = Any amino acid
  VARIANT 27: note = Any amino acid
  VARIANT 28: note = Any amino acid
  VARIANT 29: note = Any amino acid
  VARIANT 30: note = Any amino acid
  VARIANT 31: note = Any amino acid
  VARIANT 32: note = Any amino acid
  VARIANT 33: note = Any amino acid
  VARIANT 34: note = Any amino acid
  VARIANT 35: note = Any amino acid
  VARIANT 36: note = Any amino acid
  VARIANT 37: note = Any amino acid
  VARIANT 38: note = Any amino acid
  VARIANT 39: note = Any amino acid
  VARIANT 40: note = Any amino acid
  VARIANT 41: note = Any amino acid
  VARIANT 42: note = Any amino acid
  VARIANT 43: note = Any amino acid
  VARIANT 44: note = Any amino acid
  VARIANT 45: note = Any amino acid
  VARIANT 46: note = Any amino acid
  VARIANT 47: note = Any amino acid
  VARIANT 48: note = Any amino acid
  VARIANT 49: note = Any amino acid
  VARIANT 50: note = Any amino acid
  VARIANT 51: note = Any amino acid
  VARIANT 52: note = Any amino acid
  VARIANT 54: note = Any amino acid
  VARIANT 55: note = Any amino acid
  VARIANT 56: note = Any amino acid
  VARIANT 57: note = Any amino acid
  VARIANT 58: note = Any amino acid
  VARIANT 59: note = Any amino acid
  VARIANT 60: note = Any amino acid
  VARIANT 61: note = Any amino acid
  VARIANT 62: note = Any amino acid
  VARIANT 63: note = Any amino acid
  VARIANT 64: note = Any amino acid
  VARIANT 65: note = Any amino acid
  VARIANT 66: note = Any amino acid
  VARIANT 67: note = Any amino acid
  VARIANT 68: note = Any amino acid
  VARIANT 69: note = Any amino acid
  VARIANT 70: note = Any amino acid
  VARIANT 71: note = Any amino acid
  VARIANT 72: note = Any amino acid
  VARIANT 73: note = Any amino acid
  VARIANT 74: note = Any amino acid
  VARIANT 75: note = Any amino acid
  VARIANT 76: note = Any amino acid
  VARIANT 77: note = Any amino acid
  VARIANT 78: note = Any amino acid
  VARIANT 79: note = Any amino acid
  VARIANT 80: note = Any amino acid
  VARIANT 81: note = Any amino acid
  VARIANT 82: note = Any amino acid
  VARIANT 83: note = Any amino acid
  VARIANT 84: note = Any amino acid
  VARIANT 85: note = Any amino acid
  VARIANT 86: note = Any amino acid
  VARIANT 87: note = Any amino acid
  VARIANT 88: note = Any amino acid
  VARIANT 89: note = Any amino acid
  VARIANT 90: note = Any amino acid
  VARIANT 91: note = Any amino acid
  VARIANT 92: note = Any amino acid
  VARIANT 93: note = Any amino acid
  VARIANT 94: note = Any amino acid
  VARIANT 96: note = Any amino acid
  VARIANT 98: note = Any amino acid
  VARIANT 99: note = Any amino acid
DXXXXXXXXXXXXXXXXXXXXXXXXXXXXXXXXXXXXXXXXXXXXXXXXXXXEXXXXXXXXXXXXXXXXXXXXXXXXXXXXXXXXXXXXXXXXXKXDXXD

SEQ ID NO: 795658 - protein, 89 aa, unidentified
  VARIANT 2: note = Any amino acid
  VARIANT 3: note = Any amino acid
  VARIANT 4: note = Any amino acid
  VARIANT 5: note = Any amino acid
  VARIANT 6: note = Any amino acid
  VARIANT 7: note = Any amino acid
  VARIANT 8: note = Any amino acid
  VARIANT 9: note = Any amino acid
  VARIANT 10: note = Any amino acid
  VARIANT 11: note = Any amino acid
  VARIANT 12: note = Any amino acid
  VARIANT 13: note = Any amino acid
  VARIANT 14: note = Any amino acid
  VARIANT 15: note = Any amino acid
  VARIANT 16: note = Any amino acid
  VARIANT 17: note = Any amino acid
  VARIANT 18: note = Any amino acid
  VARIANT 19: note = Any amino acid
  VARIANT 20: note = Any amino acid
  VARIANT 21: note = Any amino acid
  VARIANT 22: note = Any amino acid
  VARIANT 23: note = Any amino acid
  VARIANT 24: note = Any amino acid
  VARIANT 25: note = Any amino acid
  VARIANT 26: note = Any amino acid
  VARIANT 27: note = Any amino acid
  VARIANT 28: note = Any amino acid
  VARIANT 29: note = Any amino acid
  VARIANT 30: note = Any amino acid
  VARIANT 31: note = Any amino acid
  VARIANT 32: note = Any amino acid
  VARIANT 33: note = Any amino acid
  VARIANT 34: note = Any amino acid
  VARIANT 35: note = Any amino acid
  VARIANT 36: note = Any amino acid
  VARIANT 37: note = Any amino acid
  VARIANT 38: note = Any amino acid
  VARIANT 39: note = Any amino acid
  VARIANT 40: note = Any amino acid
  VARIANT 41: note = Any amino acid
  VARIANT 42: note = Any amino acid
  VARIANT 43: note = Any amino acid
  VARIANT 44: note = Any amino acid
  VARIANT 45: note = Any amino acid
  VARIANT 46: note = Any amino acid
  VARIANT 47: note = Any amino acid
  VARIANT 48: note = Any amino acid
  VARIANT 49: note = Any amino acid
  VARIANT 51: note = Any amino acid
  VARIANT 52: note = Any amino acid
  VARIANT 53: note = Any amino acid
  VARIANT 54: note = Any amino acid
  VARIANT 55: note = Any amino acid
  VARIANT 56: note = Any amino acid
  VARIANT 57: note = Any amino acid
  VARIANT 58: note = Any amino acid
  VARIANT 59: note = Any amino acid
  VARIANT 60: note = Any amino acid
  VARIANT 61: note = Any amino acid
  VARIANT 62: note = Any amino acid
  VARIANT 63: note = Any amino acid
  VARIANT 64: note = Any amino acid
  VARIANT 65: note = Any amino acid
  VARIANT 66: note = Any amino acid
  VARIANT 67: note = Any amino acid
  VARIANT 68: note = Any amino acid
  VARIANT 69: note = Any amino acid
  VARIANT 70: note = Any amino acid
  VARIANT 71: note = Any amino acid
  VARIANT 72: note = Any amino acid
  VARIANT 73: note = Any amino acid
  VARIANT 74: note = Any amino acid
  VARIANT 75: note = Any amino acid
  VARIANT 76: note = Any amino acid
  VARIANT 77: note = Any amino acid
  VARIANT 78: note = Any amino acid
  VARIANT 79: note = Any amino acid
  VARIANT 80: note = Any amino acid
  VARIANT 81: note = Any amino acid
  VARIANT 82: note = Any amino acid
  VARIANT 83: note = Any amino acid
  VARIANT 85: note = Any amino acid
  VARIANT 87: note = Any amino acid
  VARIANT 88: note = Any amino acid
DXXXXXXXXXXXXXXXXXXXXXXXXXXXXXXXXXXXXXXXXXXXXXXXXEXXXXXXXXXXXXXXXXXXXXXXXXXXXXXXXXXKXDXXD

SEQ ID NO: 795659 - protein, 91 aa, unidentified
  VARIANT 2: note = Any amino acid
  VARIANT 3: note = Any amino acid
  VARIANT 4: note = Any amino acid
  VARIANT 5: note = Any amino acid
  VARIANT 6: note = Any amino acid
  VARIANT 7: note = Any amino acid
  VARIANT 8: note = Any amino acid
  VARIANT 9: note = Any amino acid
  VARIANT 10: note = Any amino acid
  VARIANT 11: note = Any amino acid
  VARIANT 12: note = Any amino acid
  VARIANT 13: note = Any amino acid
  VARIANT 14: note = Any amino acid
  VARIANT 15: note = Any amino acid
  VARIANT 16: note = Any amino acid
  VARIANT 17: note = Any amino acid
  VARIANT 18: note = Any amino acid
  VARIANT 19: note = Any amino acid
  VARIANT 20: note = Any amino acid
  VARIANT 21: note = Any amino acid
  VARIANT 22: note = Any amino acid
  VARIANT 23: note = Any amino acid
  VARIANT 24: note = Any amino acid
  VARIANT 25: note = Any amino acid
  VARIANT 26: note = Any amino acid
  VARIANT 27: note = Any amino acid
  VARIANT 28: note = Any amino acid
  VARIANT 29: note = Any amino acid
  VARIANT 30: note = Any amino acid
  VARIANT 31: note = Any amino acid
  VARIANT 32: note = Any amino acid
  VARIANT 33: note = Any amino acid
  VARIANT 34: note = Any amino acid
  VARIANT 35: note = Any amino acid
  VARIANT 36: note = Any amino acid
  VARIANT 37: note = Any amino acid
  VARIANT 38: note = Any amino acid
  VARIANT 39: note = Any amino acid
  VARIANT 40: note = Any amino acid
  VARIANT 41: note = Any amino acid
  VARIANT 42: note = Any amino acid
  VARIANT 43: note = Any amino acid
  VARIANT 44: note = Any amino acid
  VARIANT 45: note = Any amino acid
  VARIANT 46: note = Any amino acid
  VARIANT 47: note = Any amino acid
  VARIANT 48: note = Any amino acid
  VARIANT 50: note = Any amino acid
  VARIANT 51: note = Any amino acid
  VARIANT 52: note = Any amino acid
  VARIANT 53: note = Any amino acid
  VARIANT 54: note = Any amino acid
  VARIANT 55: note = Any amino acid
  VARIANT 56: note = Any amino acid
  VARIANT 57: note = Any amino acid
  VARIANT 58: note = Any amino acid
  VARIANT 59: note = Any amino acid
  VARIANT 60: note = Any amino acid
  VARIANT 61: note = Any amino acid
  VARIANT 62: note = Any amino acid
  VARIANT 63: note = Any amino acid
  VARIANT 64: note = Any amino acid
  VARIANT 65: note = Any amino acid
  VARIANT 66: note = Any amino acid
  VARIANT 67: note = Any amino acid
  VARIANT 68: note = Any amino acid
  VARIANT 69: note = Any amino acid
  VARIANT 70: note = Any amino acid
  VARIANT 71: note = Any amino acid
  VARIANT 72: note = Any amino acid
  VARIANT 73: note = Any amino acid
  VARIANT 74: note = Any amino acid
  VARIANT 75: note = Any amino acid
  VARIANT 76: note = Any amino acid
  VARIANT 77: note = Any amino acid
  VARIANT 78: note = Any amino acid
  VARIANT 79: note = Any amino acid
  VARIANT 80: note = Any amino acid
  VARIANT 81: note = Any amino acid
  VARIANT 82: note = Any amino acid
  VARIANT 83: note = Any amino acid
  VARIANT 84: note = Any amino acid
  VARIANT 85: note = Any amino acid
  VARIANT 87: note = Any amino acid
  VARIANT 89: note = Any amino acid
  VARIANT 90: note = Any amino acid
DXXXXXXXXXXXXXXXXXXXXXXXXXXXXXXXXXXXXXXXXXXXXXXXEXXXXXXXXXXXXXXXXXXXXXXXXXXXXXXXXXXXXKXDXXD

SEQ ID NO: 795660 - protein, 96 aa, unidentified
  VARIANT 2: note = Any amino acid
  VARIANT 3: note = Any amino acid
  VARIANT 4: note = Any amino acid
  VARIANT 5: note = Any amino acid
  VARIANT 6: note = Any amino acid
  VARIANT 7: note = Any amino acid
  VARIANT 8: note = Any amino acid
  VARIANT 9: note = Any amino acid
  VARIANT 10: note = Any amino acid
  VARIANT 11: note = Any amino acid
  VARIANT 12: note = Any amino acid
  VARIANT 13: note = Any amino acid
  VARIANT 14: note = Any amino acid
  VARIANT 15: note = Any amino acid
  VARIANT 16: note = Any amino acid
  VARIANT 17: note = Any amino acid
  VARIANT 18: note = Any amino acid
  VARIANT 19: note = Any amino acid
  VARIANT 20: note = Any amino acid
  VARIANT 21: note = Any amino acid
  VARIANT 22: note = Any amino acid
  VARIANT 23: note = Any amino acid
  VARIANT 24: note = Any amino acid
  VARIANT 25: note = Any amino acid
  VARIANT 26: note = Any amino acid
  VARIANT 27: note = Any amino acid
  VARIANT 28: note = Any amino acid
  VARIANT 29: note = Any amino acid
  VARIANT 30: note = Any amino acid
  VARIANT 31: note = Any amino acid
  VARIANT 32: note = Any amino acid
  VARIANT 33: note = Any amino acid
  VARIANT 34: note = Any amino acid
  VARIANT 35: note = Any amino acid
  VARIANT 36: note = Any amino acid
  VARIANT 37: note = Any amino acid
  VARIANT 38: note = Any amino acid
  VARIANT 39: note = Any amino acid
  VARIANT 40: note = Any amino acid
  VARIANT 41: note = Any amino acid
  VARIANT 42: note = Any amino acid
  VARIANT 43: note = Any amino acid
  VARIANT 44: note = Any amino acid
  VARIANT 45: note = Any amino acid
  VARIANT 46: note = Any amino acid
  VARIANT 47: note = Any amino acid
  VARIANT 48: note = Any amino acid
  VARIANT 49: note = Any amino acid
  VARIANT 51: note = Any amino acid
  VARIANT 52: note = Any amino acid
  VARIANT 53: note = Any amino acid
  VARIANT 54: note = Any amino acid
  VARIANT 55: note = Any amino acid
  VARIANT 56: note = Any amino acid
  VARIANT 57: note = Any amino acid
  VARIANT 58: note = Any amino acid
  VARIANT 59: note = Any amino acid
  VARIANT 60: note = Any amino acid
  VARIANT 61: note = Any amino acid
  VARIANT 62: note = Any amino acid
  VARIANT 63: note = Any amino acid
  VARIANT 64: note = Any amino acid
  VARIANT 65: note = Any amino acid
  VARIANT 66: note = Any amino acid
  VARIANT 67: note = Any amino acid
  VARIANT 68: note = Any amino acid
  VARIANT 69: note = Any amino acid
  VARIANT 70: note = Any amino acid
  VARIANT 71: note = Any amino acid
  VARIANT 72: note = Any amino acid
  VARIANT 73: note = Any amino acid
  VARIANT 74: note = Any amino acid
  VARIANT 75: note = Any amino acid
  VARIANT 76: note = Any amino acid
  VARIANT 77: note = Any amino acid
  VARIANT 78: note = Any amino acid
  VARIANT 79: note = Any amino acid
  VARIANT 80: note = Any amino acid
  VARIANT 81: note = Any amino acid
  VARIANT 82: note = Any amino acid
  VARIANT 83: note = Any amino acid
  VARIANT 84: note = Any amino acid
  VARIANT 85: note = Any amino acid
  VARIANT 86: note = Any amino acid
  VARIANT 87: note = Any amino acid
  VARIANT 88: note = Any amino acid
  VARIANT 89: note = Any amino acid
  VARIANT 90: note = Any amino acid
  VARIANT 92: note = Any amino acid
  VARIANT 94: note = Any amino acid
  VARIANT 95: note = Any amino acid
DXXXXXXXXXXXXXXXXXXXXXXXXXXXXXXXXXXXXXXXXXXXXXXXXGXXXXXXXXXXXXXXXXXXXXXXXXXXXXXXXXXXXXXXXXKXDXXD

SEQ ID NO: 795661 - protein, 95 aa, unidentified
  VARIANT 2: note = Any amino acid
  VARIANT 3: note = Any amino acid
  VARIANT 4: note = Any amino acid
  VARIANT 5: note = Any amino acid
  VARIANT 6: note = Any amino acid
  VARIANT 7: note = Any amino acid
  VARIANT 8: note = Any amino acid
  VARIANT 9: note = Any amino acid
  VARIANT 10: note = Any amino acid
  VARIANT 11: note = Any amino acid
  VARIANT 12: note = Any amino acid
  VARIANT 13: note = Any amino acid
  VARIANT 14: note = Any amino acid
  VARIANT 15: note = Any amino acid
  VARIANT 16: note = Any amino acid
  VARIANT 17: note = Any amino acid
  VARIANT 18: note = Any amino acid
  VARIANT 19: note = Any amino acid
  VARIANT 20: note = Any amino acid
  VARIANT 21: note = Any amino acid
  VARIANT 22: note = Any amino acid
  VARIANT 23: note = Any amino acid
  VARIANT 24: note = Any amino acid
  VARIANT 25: note = Any amino acid
  VARIANT 26: note = Any amino acid
  VARIANT 27: note = Any amino acid
  VARIANT 28: note = Any amino acid
  VARIANT 29: note = Any amino acid
  VARIANT 30: note = Any amino acid
  VARIANT 31: note = Any amino acid
  VARIANT 32: note = Any amino acid
  VARIANT 33: note = Any amino acid
  VARIANT 34: note = Any amino acid
  VARIANT 35: note = Any amino acid
  VARIANT 36: note = Any amino acid
  VARIANT 37: note = Any amino acid
  VARIANT 38: note = Any amino acid
  VARIANT 39: note = Any amino acid
  VARIANT 40: note = Any amino acid
  VARIANT 41: note = Any amino acid
  VARIANT 42: note = Any amino acid
  VARIANT 43: note = Any amino acid
  VARIANT 44: note = Any amino acid
  VARIANT 45: note = Any amino acid
  VARIANT 46: note = Any amino acid
  VARIANT 47: note = Any amino acid
  VARIANT 48: note = Any amino acid
  VARIANT 49: note = Any amino acid
  VARIANT 50: note = Any amino acid
  VARIANT 51: note = Any amino acid
  VARIANT 52: note = Any amino acid
  VARIANT 54: note = Any amino acid
  VARIANT 55: note = Any amino acid
  VARIANT 56: note = Any amino acid
  VARIANT 57: note = Any amino acid
  VARIANT 58: note = Any amino acid
  VARIANT 59: note = Any amino acid
  VARIANT 60: note = Any amino acid
  VARIANT 61: note = Any amino acid
  VARIANT 62: note = Any amino acid
  VARIANT 63: note = Any amino acid
  VARIANT 64: note = Any amino acid
  VARIANT 65: note = Any amino acid
  VARIANT 66: note = Any amino acid
  VARIANT 67: note = Any amino acid
  VARIANT 68: note = Any amino acid
  VARIANT 69: note = Any amino acid
  VARIANT 70: note = Any amino acid
  VARIANT 71: note = Any amino acid
  VARIANT 72: note = Any amino acid
  VARIANT 73: note = Any amino acid
  VARIANT 74: note = Any amino acid
  VARIANT 75: note = Any amino acid
  VARIANT 76: note = Any amino acid
  VARIANT 77: note = Any amino acid
  VARIANT 78: note = Any amino acid
  VARIANT 79: note = Any amino acid
  VARIANT 80: note = Any amino acid
  VARIANT 81: note = Any amino acid
  VARIANT 82: note = Any amino acid
  VARIANT 83: note = Any amino acid
  VARIANT 84: note = Any amino acid
  VARIANT 85: note = Any amino acid
  VARIANT 86: note = Any amino acid
  VARIANT 87: note = Any amino acid
  VARIANT 88: note = Any amino acid
  VARIANT 89: note = Any amino acid
  VARIANT 91: note = Any amino acid
  VARIANT 93: note = Any amino acid
  VARIANT 94: note = Any amino acid
DXXXXXXXXXXXXXXXXXXXXXXXXXXXXXXXXXXXXXXXXXXXXXXXXXXXEXXXXXXXXXXXXXXXXXXXXXXXXXXXXXXXXXXXXKXDXXD

SEQ ID NO: 795662 - protein, 103 aa, unidentified
  VARIANT 2: note = Any amino acid
  VARIANT 3: note = Any amino acid
  VARIANT 4: note = Any amino acid
  VARIANT 5: note = Any amino acid
  VARIANT 6: note = Any amino acid
  VARIANT 7: note = Any amino acid
  VARIANT 8: note = Any amino acid
  VARIANT 9: note = Any amino acid
  VARIANT 10: note = Any amino acid
  VARIANT 11: note = Any amino acid
  VARIANT 12: note = Any amino acid
  VARIANT 13: note = Any amino acid
  VARIANT 14: note = Any amino acid
  VARIANT 15: note = Any amino acid
  VARIANT 16: note = Any amino acid
  VARIANT 17: note = Any amino acid
  VARIANT 18: note = Any amino acid
  VARIANT 19: note = Any amino acid
  VARIANT 20: note = Any amino acid
  VARIANT 21: note = Any amino acid
  VARIANT 22: note = Any amino acid
  VARIANT 23: note = Any amino acid
  VARIANT 24: note = Any amino acid
  VARIANT 25: note = Any amino acid
  VARIANT 26: note = Any amino acid
  VARIANT 27: note = Any amino acid
  VARIANT 28: note = Any amino acid
  VARIANT 29: note = Any amino acid
  VARIANT 30: note = Any amino acid
  VARIANT 31: note = Any amino acid
  VARIANT 32: note = Any amino acid
  VARIANT 33: note = Any amino acid
  VARIANT 34: note = Any amino acid
  VARIANT 35: note = Any amino acid
  VARIANT 36: note = Any amino acid
  VARIANT 37: note = Any amino acid
  VARIANT 38: note = Any amino acid
  VARIANT 39: note = Any amino acid
  VARIANT 40: note = Any amino acid
  VARIANT 41: note = Any amino acid
  VARIANT 42: note = Any amino acid
  VARIANT 43: note = Any amino acid
  VARIANT 44: note = Any amino acid
  VARIANT 45: note = Any amino acid
  VARIANT 46: note = Any amino acid
  VARIANT 47: note = Any amino acid
  VARIANT 48: note = Any amino acid
  VARIANT 49: note = Any amino acid
  VARIANT 50: note = Any amino acid
  VARIANT 51: note = Any amino acid
  VARIANT 52: note = Any amino acid
  VARIANT 53: note = Any amino acid
  VARIANT 54: note = Any amino acid
  VARIANT 55: note = Any amino acid
  VARIANT 57: note = Any amino acid
  VARIANT 58: note = Any amino acid
  VARIANT 59: note = Any amino acid
  VARIANT 60: note = Any amino acid
  VARIANT 61: note = Any amino acid
  VARIANT 62: note = Any amino acid
  VARIANT 63: note = Any amino acid
  VARIANT 64: note = Any amino acid
  VARIANT 65: note = Any amino acid
  VARIANT 66: note = Any amino acid
  VARIANT 67: note = Any amino acid
  VARIANT 68: note = Any amino acid
  VARIANT 69: note = Any amino acid
  VARIANT 70: note = Any amino acid
  VARIANT 71: note = Any amino acid
  VARIANT 72: note = Any amino acid
  VARIANT 73: note = Any amino acid
  VARIANT 74: note = Any amino acid
  VARIANT 75: note = Any amino acid
  VARIANT 76: note = Any amino acid
  VARIANT 77: note = Any amino acid
  VARIANT 78: note = Any amino acid
  VARIANT 79: note = Any amino acid
  VARIANT 80: note = Any amino acid
  VARIANT 81: note = Any amino acid
  VARIANT 82: note = Any amino acid
  VARIANT 83: note = Any amino acid
  VARIANT 84: note = Any amino acid
  VARIANT 85: note = Any amino acid
  VARIANT 86: note = Any amino acid
  VARIANT 87: note = Any amino acid
  VARIANT 88: note = Any amino acid
  VARIANT 89: note = Any amino acid
  VARIANT 90: note = Any amino acid
  VARIANT 91: note = Any amino acid
  VARIANT 92: note = Any amino acid
  VARIANT 93: note = Any amino acid
  VARIANT 94: note = Any amino acid
  VARIANT 95: note = Any amino acid
  VARIANT 96: note = Any amino acid
  VARIANT 97: note = Any amino acid
  VARIANT 99: note = Any amino acid
  VARIANT 101: note = Any amino acid
  VARIANT 102: note = Any amino acid
DXXXXXXXXXXXXXXXXXXXXXXXXXXXXXXXXXXXXXXXXXXXXXXXXXXXXXXEXXXXXXXXXXXXXXXXXXXXXXXXXXXXXXXXXXXXXXXXXKXDXXD

SEQ ID NO: 795663 - protein, 92 aa, unidentified
  VARIANT 2: note = Any amino acid
  VARIANT 3: note = Any amino acid
  VARIANT 4: note = Any amino acid
  VARIANT 5: note = Any amino acid
  VARIANT 6: note = Any amino acid
  VARIANT 7: note = Any amino acid
  VARIANT 8: note = Any amino acid
  VARIANT 9: note = Any amino acid
  VARIANT 10: note = Any amino acid
  VARIANT 11: note = Any amino acid
  VARIANT 12: note = Any amino acid
  VARIANT 13: note = Any amino acid
  VARIANT 14: note = Any amino acid
  VARIANT 15: note = Any amino acid
  VARIANT 16: note = Any amino acid
  VARIANT 17: note = Any amino acid
  VARIANT 18: note = Any amino acid
  VARIANT 19: note = Any amino acid
  VARIANT 20: note = Any amino acid
  VARIANT 21: note = Any amino acid
  VARIANT 22: note = Any amino acid
  VARIANT 23: note = Any amino acid
  VARIANT 24: note = Any amino acid
  VARIANT 25: note = Any amino acid
  VARIANT 26: note = Any amino acid
  VARIANT 27: note = Any amino acid
  VARIANT 28: note = Any amino acid
  VARIANT 29: note = Any amino acid
  VARIANT 30: note = Any amino acid
  VARIANT 31: note = Any amino acid
  VARIANT 32: note = Any amino acid
  VARIANT 33: note = Any amino acid
  VARIANT 34: note = Any amino acid
  VARIANT 35: note = Any amino acid
  VARIANT 36: note = Any amino acid
  VARIANT 37: note = Any amino acid
  VARIANT 38: note = Any amino acid
  VARIANT 39: note = Any amino acid
  VARIANT 40: note = Any amino acid
  VARIANT 41: note = Any amino acid
  VARIANT 42: note = Any amino acid
  VARIANT 43: note = Any amino acid
  VARIANT 44: note = Any amino acid
  VARIANT 45: note = Any amino acid
  VARIANT 46: note = Any amino acid
  VARIANT 47: note = Any amino acid
  VARIANT 49: note = Any amino acid
  VARIANT 50: note = Any amino acid
  VARIANT 51: note = Any amino acid
  VARIANT 52: note = Any amino acid
  VARIANT 53: note = Any amino acid
  VARIANT 54: note = Any amino acid
  VARIANT 55: note = Any amino acid
  VARIANT 56: note = Any amino acid
  VARIANT 57: note = Any amino acid
  VARIANT 58: note = Any amino acid
  VARIANT 59: note = Any amino acid
  VARIANT 60: note = Any amino acid
  VARIANT 61: note = Any amino acid
  VARIANT 62: note = Any amino acid
  VARIANT 63: note = Any amino acid
  VARIANT 64: note = Any amino acid
  VARIANT 65: note = Any amino acid
  VARIANT 66: note = Any amino acid
  VARIANT 67: note = Any amino acid
  VARIANT 68: note = Any amino acid
  VARIANT 69: note = Any amino acid
  VARIANT 70: note = Any amino acid
  VARIANT 71: note = Any amino acid
  VARIANT 72: note = Any amino acid
  VARIANT 73: note = Any amino acid
  VARIANT 74: note = Any amino acid
  VARIANT 75: note = Any amino acid
  VARIANT 76: note = Any amino acid
  VARIANT 77: note = Any amino acid
  VARIANT 78: note = Any amino acid
  VARIANT 79: note = Any amino acid
  VARIANT 80: note = Any amino acid
  VARIANT 81: note = Any amino acid
  VARIANT 82: note = Any amino acid
  VARIANT 83: note = Any amino acid
  VARIANT 84: note = Any amino acid
  VARIANT 85: note = Any amino acid
  VARIANT 86: note = Any amino acid
  VARIANT 88: note = Any amino acid
  VARIANT 90: note = Any amino acid
  VARIANT 91: note = Any amino acid
DXXXXXXXXXXXXXXXXXXXXXXXXXXXXXXXXXXXXXXXXXXXXXXEXXXXXXXXXXXXXXXXXXXXXXXXXXXXXXXXXXXXXXKXDXXD

SEQ ID NO: 795664 - protein, 98 aa, unidentified
  VARIANT 2: note = Any amino acid
  VARIANT 3: note = Any amino acid
  VARIANT 4: note = Any amino acid
  VARIANT 5: note = Any amino acid
  VARIANT 6: note = Any amino acid
  VARIANT 7: note = Any amino acid
  VARIANT 8: note = Any amino acid
  VARIANT 9: note = Any amino acid
  VARIANT 10: note = Any amino acid
  VARIANT 11: note = Any amino acid
  VARIANT 12: note = Any amino acid
  VARIANT 13: note = Any amino acid
  VARIANT 14: note = Any amino acid
  VARIANT 15: note = Any amino acid
  VARIANT 16: note = Any amino acid
  VARIANT 17: note = Any amino acid
  VARIANT 18: note = Any amino acid
  VARIANT 19: note = Any amino acid
  VARIANT 20: note = Any amino acid
  VARIANT 21: note = Any amino acid
  VARIANT 22: note = Any amino acid
  VARIANT 23: note = Any amino acid
  VARIANT 24: note = Any amino acid
  VARIANT 25: note = Any amino acid
  VARIANT 26: note = Any amino acid
  VARIANT 27: note = Any amino acid
  VARIANT 28: note = Any amino acid
  VARIANT 29: note = Any amino acid
  VARIANT 30: note = Any amino acid
  VARIANT 31: note = Any amino acid
  VARIANT 32: note = Any amino acid
  VARIANT 33: note = Any amino acid
  VARIANT 34: note = Any amino acid
  VARIANT 35: note = Any amino acid
  VARIANT 36: note = Any amino acid
  VARIANT 37: note = Any amino acid
  VARIANT 38: note = Any amino acid
  VARIANT 39: note = Any amino acid
  VARIANT 40: note = Any amino acid
  VARIANT 41: note = Any amino acid
  VARIANT 42: note = Any amino acid
  VARIANT 43: note = Any amino acid
  VARIANT 44: note = Any amino acid
  VARIANT 45: note = Any amino acid
  VARIANT 46: note = Any amino acid
  VARIANT 47: note = Any amino acid
  VARIANT 48: note = Any amino acid
  VARIANT 49: note = Any amino acid
  VARIANT 50: note = Any amino acid
  VARIANT 52: note = Any amino acid
  VARIANT 53: note = Any amino acid
  VARIANT 54: note = Any amino acid
  VARIANT 55: note = Any amino acid
  VARIANT 56: note = Any amino acid
  VARIANT 57: note = Any amino acid
  VARIANT 58: note = Any amino acid
  VARIANT 59: note = Any amino acid
  VARIANT 60: note = Any amino acid
  VARIANT 61: note = Any amino acid
  VARIANT 62: note = Any amino acid
  VARIANT 63: note = Any amino acid
  VARIANT 64: note = Any amino acid
  VARIANT 65: note = Any amino acid
  VARIANT 66: note = Any amino acid
  VARIANT 67: note = Any amino acid
  VARIANT 68: note = Any amino acid
  VARIANT 69: note = Any amino acid
  VARIANT 70: note = Any amino acid
  VARIANT 71: note = Any amino acid
  VARIANT 72: note = Any amino acid
  VARIANT 73: note = Any amino acid
  VARIANT 74: note = Any amino acid
  VARIANT 75: note = Any amino acid
  VARIANT 76: note = Any amino acid
  VARIANT 77: note = Any amino acid
  VARIANT 78: note = Any amino acid
  VARIANT 79: note = Any amino acid
  VARIANT 80: note = Any amino acid
  VARIANT 81: note = Any amino acid
  VARIANT 82: note = Any amino acid
  VARIANT 83: note = Any amino acid
  VARIANT 84: note = Any amino acid
  VARIANT 85: note = Any amino acid
  VARIANT 86: note = Any amino acid
  VARIANT 87: note = Any amino acid
  VARIANT 88: note = Any amino acid
  VARIANT 89: note = Any amino acid
  VARIANT 90: note = Any amino acid
  VARIANT 91: note = Any amino acid
  VARIANT 92: note = Any amino acid
  VARIANT 94: note = Any amino acid
  VARIANT 96: note = Any amino acid
  VARIANT 97: note = Any amino acid
DXXXXXXXXXXXXXXXXXXXXXXXXXXXXXXXXXXXXXXXXXXXXXXXXXEXXXXXXXXXXXXXXXXXXXXXXXXXXXXXXXXXXXXXXXXXKXDXXD

SEQ ID NO: 795665 - protein, 106 aa, unidentified
  VARIANT 2: note = Any amino acid
  VARIANT 3: note = Any amino acid
  VARIANT 4: note = Any amino acid
  VARIANT 5: note = Any amino acid
  VARIANT 6: note = Any amino acid
  VARIANT 7: note = Any amino acid
  VARIANT 8: note = Any amino acid
  VARIANT 9: note = Any amino acid
  VARIANT 10: note = Any amino acid
  VARIANT 11: note = Any amino acid
  VARIANT 12: note = Any amino acid
  VARIANT 13: note = Any amino acid
  VARIANT 14: note = Any amino acid
  VARIANT 15: note = Any amino acid
  VARIANT 16: note = Any amino acid
  VARIANT 17: note = Any amino acid
  VARIANT 18: note = Any amino acid
  VARIANT 19: note = Any amino acid
  VARIANT 20: note = Any amino acid
  VARIANT 21: note = Any amino acid
  VARIANT 22: note = Any amino acid
  VARIANT 23: note = Any amino acid
  VARIANT 24: note = Any amino acid
  VARIANT 25: note = Any amino acid
  VARIANT 26: note = Any amino acid
  VARIANT 27: note = Any amino acid
  VARIANT 28: note = Any amino acid
  VARIANT 29: note = Any amino acid
  VARIANT 30: note = Any amino acid
  VARIANT 31: note = Any amino acid
  VARIANT 32: note = Any amino acid
  VARIANT 33: note = Any amino acid
  VARIANT 34: note = Any amino acid
  VARIANT 35: note = Any amino acid
  VARIANT 36: note = Any amino acid
  VARIANT 37: note = Any amino acid
  VARIANT 38: note = Any amino acid
  VARIANT 39: note = Any amino acid
  VARIANT 40: note = Any amino acid
  VARIANT 41: note = Any amino acid
  VARIANT 42: note = Any amino acid
  VARIANT 43: note = Any amino acid
  VARIANT 44: note = Any amino acid
  VARIANT 45: note = Any amino acid
  VARIANT 46: note = Any amino acid
  VARIANT 47: note = Any amino acid
  VARIANT 48: note = Any amino acid
  VARIANT 49: note = Any amino acid
  VARIANT 50: note = Any amino acid
  VARIANT 51: note = Any amino acid
  VARIANT 52: note = Any amino acid
  VARIANT 53: note = Any amino acid
  VARIANT 54: note = Any amino acid
  VARIANT 55: note = Any amino acid
  VARIANT 56: note = Any amino acid
  VARIANT 57: note = Any amino acid
  VARIANT 58: note = Any amino acid
  VARIANT 59: note = Any amino acid
  VARIANT 60: note = Any amino acid
  VARIANT 62: note = Any amino acid
  VARIANT 63: note = Any amino acid
  VARIANT 64: note = Any amino acid
  VARIANT 65: note = Any amino acid
  VARIANT 66: note = Any amino acid
  VARIANT 67: note = Any amino acid
  VARIANT 68: note = Any amino acid
  VARIANT 69: note = Any amino acid
  VARIANT 70: note = Any amino acid
  VARIANT 71: note = Any amino acid
  VARIANT 72: note = Any amino acid
  VARIANT 73: note = Any amino acid
  VARIANT 74: note = Any amino acid
  VARIANT 75: note = Any amino acid
  VARIANT 76: note = Any amino acid
  VARIANT 77: note = Any amino acid
  VARIANT 78: note = Any amino acid
  VARIANT 79: note = Any amino acid
  VARIANT 80: note = Any amino acid
  VARIANT 81: note = Any amino acid
  VARIANT 82: note = Any amino acid
  VARIANT 83: note = Any amino acid
  VARIANT 84: note = Any amino acid
  VARIANT 85: note = Any amino acid
  VARIANT 86: note = Any amino acid
  VARIANT 87: note = Any amino acid
  VARIANT 88: note = Any amino acid
  VARIANT 89: note = Any amino acid
  VARIANT 90: note = Any amino acid
  VARIANT 91: note = Any amino acid
  VARIANT 92: note = Any amino acid
  VARIANT 93: note = Any amino acid
  VARIANT 94: note = Any amino acid
  VARIANT 95: note = Any amino acid
  VARIANT 96: note = Any amino acid
  VARIANT 97: note = Any amino acid
  VARIANT 98: note = Any amino acid
  VARIANT 99: note = Any amino acid
  VARIANT 100: note = Any amino acid
  VARIANT 102: note = Any amino acid
  VARIANT 104: note = Any amino acid
  VARIANT 105: note = Any amino acid
DXXXXXXXXXXXXXXXXXXXXXXXXXXXXXXXXXXXXXXXXXXXXXXXXXXXXXXXXXXXGXXXXXXXXXXXXXXXXXXXXXXXXXXXXXXXXXXXXXXXKXDXXD

SEQ ID NO: 795666 - protein, 96 aa, unidentified
  VARIANT 2: note = Any amino acid
  VARIANT 3: note = Any amino acid
  VARIANT 4: note = Any amino acid
  VARIANT 5: note = Any amino acid
  VARIANT 6: note = Any amino acid
  VARIANT 7: note = Any amino acid
  VARIANT 8: note = Any amino acid
  VARIANT 9: note = Any amino acid
  VARIANT 10: note = Any amino acid
  VARIANT 11: note = Any amino acid
  VARIANT 12: note = Any amino acid
  VARIANT 13: note = Any amino acid
  VARIANT 14: note = Any amino acid
  VARIANT 15: note = Any amino acid
  VARIANT 16: note = Any amino acid
  VARIANT 17: note = Any amino acid
  VARIANT 18: note = Any amino acid
  VARIANT 19: note = Any amino acid
  VARIANT 20: note = Any amino acid
  VARIANT 21: note = Any amino acid
  VARIANT 22: note = Any amino acid
  VARIANT 23: note = Any amino acid
  VARIANT 24: note = Any amino acid
  VARIANT 25: note = Any amino acid
  VARIANT 26: note = Any amino acid
  VARIANT 27: note = Any amino acid
  VARIANT 28: note = Any amino acid
  VARIANT 29: note = Any amino acid
  VARIANT 30: note = Any amino acid
  VARIANT 31: note = Any amino acid
  VARIANT 32: note = Any amino acid
  VARIANT 33: note = Any amino acid
  VARIANT 34: note = Any amino acid
  VARIANT 35: note = Any amino acid
  VARIANT 36: note = Any amino acid
  VARIANT 37: note = Any amino acid
  VARIANT 38: note = Any amino acid
  VARIANT 39: note = Any amino acid
  VARIANT 40: note = Any amino acid
  VARIANT 41: note = Any amino acid
  VARIANT 42: note = Any amino acid
  VARIANT 43: note = Any amino acid
  VARIANT 44: note = Any amino acid
  VARIANT 45: note = Any amino acid
  VARIANT 46: note = Any amino acid
  VARIANT 47: note = Any amino acid
  VARIANT 48: note = Any amino acid
  VARIANT 49: note = Any amino acid
  VARIANT 51: note = Any amino acid
  VARIANT 52: note = Any amino acid
  VARIANT 53: note = Any amino acid
  VARIANT 54: note = Any amino acid
  VARIANT 55: note = Any amino acid
  VARIANT 56: note = Any amino acid
  VARIANT 57: note = Any amino acid
  VARIANT 58: note = Any amino acid
  VARIANT 59: note = Any amino acid
  VARIANT 60: note = Any amino acid
  VARIANT 61: note = Any amino acid
  VARIANT 62: note = Any amino acid
  VARIANT 63: note = Any amino acid
  VARIANT 64: note = Any amino acid
  VARIANT 65: note = Any amino acid
  VARIANT 66: note = Any amino acid
  VARIANT 67: note = Any amino acid
  VARIANT 68: note = Any amino acid
  VARIANT 69: note = Any amino acid
  VARIANT 70: note = Any amino acid
  VARIANT 71: note = Any amino acid
  VARIANT 72: note = Any amino acid
  VARIANT 73: note = Any amino acid
  VARIANT 74: note = Any amino acid
  VARIANT 75: note = Any amino acid
  VARIANT 76: note = Any amino acid
  VARIANT 77: note = Any amino acid
  VARIANT 78: note = Any amino acid
  VARIANT 79: note = Any amino acid
  VARIANT 80: note = Any amino acid
  VARIANT 81: note = Any amino acid
  VARIANT 82: note = Any amino acid
  VARIANT 83: note = Any amino acid
  VARIANT 84: note = Any amino acid
  VARIANT 85: note = Any amino acid
  VARIANT 86: note = Any amino acid
  VARIANT 87: note = Any amino acid
  VARIANT 88: note = Any amino acid
  VARIANT 89: note = Any amino acid
  VARIANT 90: note = Any amino acid
  VARIANT 92: note = Any amino acid
  VARIANT 94: note = Any amino acid
  VARIANT 95: note = Any amino acid
DXXXXXXXXXXXXXXXXXXXXXXXXXXXXXXXXXXXXXXXXXXXXXXXXIXXXXXXXXXXXXXXXXXXXXXXXXXXXXXXXXXXXXXXXXKXDXXD

SEQ ID NO: 795667 - protein, 99 aa, unidentified
  VARIANT 2: note = Any amino acid
  VARIANT 3: note = Any amino acid
  VARIANT 4: note = Any amino acid
  VARIANT 5: note = Any amino acid
  VARIANT 6: note = Any amino acid
  VARIANT 7: note = Any amino acid
  VARIANT 8: note = Any amino acid
  VARIANT 9: note = Any amino acid
  VARIANT 10: note = Any amino acid
  VARIANT 11: note = Any amino acid
  VARIANT 12: note = Any amino acid
  VARIANT 13: note = Any amino acid
  VARIANT 14: note = Any amino acid
  VARIANT 15: note = Any amino acid
  VARIANT 16: note = Any amino acid
  VARIANT 17: note = Any amino acid
  VARIANT 18: note = Any amino acid
  VARIANT 19: note = Any amino acid
  VARIANT 20: note = Any amino acid
  VARIANT 21: note = Any amino acid
  VARIANT 22: note = Any amino acid
  VARIANT 23: note = Any amino acid
  VARIANT 24: note = Any amino acid
  VARIANT 25: note = Any amino acid
  VARIANT 26: note = Any amino acid
  VARIANT 27: note = Any amino acid
  VARIANT 28: note = Any amino acid
  VARIANT 29: note = Any amino acid
  VARIANT 30: note = Any amino acid
  VARIANT 31: note = Any amino acid
  VARIANT 32: note = Any amino acid
  VARIANT 33: note = Any amino acid
  VARIANT 34: note = Any amino acid
  VARIANT 35: note = Any amino acid
  VARIANT 36: note = Any amino acid
  VARIANT 37: note = Any amino acid
  VARIANT 38: note = Any amino acid
  VARIANT 39: note = Any amino acid
  VARIANT 40: note = Any amino acid
  VARIANT 41: note = Any amino acid
  VARIANT 42: note = Any amino acid
  VARIANT 43: note = Any amino acid
  VARIANT 44: note = Any amino acid
  VARIANT 45: note = Any amino acid
  VARIANT 46: note = Any amino acid
  VARIANT 47: note = Any amino acid
  VARIANT 48: note = Any amino acid
  VARIANT 49: note = Any amino acid
  VARIANT 50: note = Any amino acid
  VARIANT 51: note = Any amino acid
  VARIANT 53: note = Any amino acid
  VARIANT 54: note = Any amino acid
  VARIANT 55: note = Any amino acid
  VARIANT 56: note = Any amino acid
  VARIANT 57: note = Any amino acid
  VARIANT 58: note = Any amino acid
  VARIANT 59: note = Any amino acid
  VARIANT 60: note = Any amino acid
  VARIANT 61: note = Any amino acid
  VARIANT 62: note = Any amino acid
  VARIANT 63: note = Any amino acid
  VARIANT 64: note = Any amino acid
  VARIANT 65: note = Any amino acid
  VARIANT 66: note = Any amino acid
  VARIANT 67: note = Any amino acid
  VARIANT 68: note = Any amino acid
  VARIANT 69: note = Any amino acid
  VARIANT 70: note = Any amino acid
  VARIANT 71: note = Any amino acid
  VARIANT 72: note = Any amino acid
  VARIANT 73: note = Any amino acid
  VARIANT 74: note = Any amino acid
  VARIANT 75: note = Any amino acid
  VARIANT 76: note = Any amino acid
  VARIANT 77: note = Any amino acid
  VARIANT 78: note = Any amino acid
  VARIANT 79: note = Any amino acid
  VARIANT 80: note = Any amino acid
  VARIANT 81: note = Any amino acid
  VARIANT 82: note = Any amino acid
  VARIANT 83: note = Any amino acid
  VARIANT 84: note = Any amino acid
  VARIANT 85: note = Any amino acid
  VARIANT 86: note = Any amino acid
  VARIANT 87: note = Any amino acid
  VARIANT 88: note = Any amino acid
  VARIANT 89: note = Any amino acid
  VARIANT 90: note = Any amino acid
  VARIANT 91: note = Any amino acid
  VARIANT 92: note = Any amino acid
  VARIANT 93: note = Any amino acid
  VARIANT 95: note = Any amino acid
  VARIANT 97: note = Any amino acid
  VARIANT 98: note = Any amino acid
DXXXXXXXXXXXXXXXXXXXXXXXXXXXXXXXXXXXXXXXXXXXXXXXXXXEXXXXXXXXXXXXXXXXXXXXXXXXXXXXXXXXXXXXXXXXXKXDXXD

SEQ ID NO: 795668 - protein, 93 aa, unidentified
  VARIANT 2: note = Any amino acid
  VARIANT 3: note = Any amino acid
  VARIANT 4: note = Any amino acid
  VARIANT 5: note = Any amino acid
  VARIANT 6: note = Any amino acid
  VARIANT 7: note = Any amino acid
  VARIANT 8: note = Any amino acid
  VARIANT 9: note = Any amino acid
  VARIANT 10: note = Any amino acid
  VARIANT 11: note = Any amino acid
  VARIANT 12: note = Any amino acid
  VARIANT 13: note = Any amino acid
  VARIANT 14: note = Any amino acid
  VARIANT 15: note = Any amino acid
  VARIANT 16: note = Any amino acid
  VARIANT 17: note = Any amino acid
  VARIANT 18: note = Any amino acid
  VARIANT 19: note = Any amino acid
  VARIANT 20: note = Any amino acid
  VARIANT 21: note = Any amino acid
  VARIANT 22: note = Any amino acid
  VARIANT 23: note = Any amino acid
  VARIANT 24: note = Any amino acid
  VARIANT 25: note = Any amino acid
  VARIANT 26: note = Any amino acid
  VARIANT 27: note = Any amino acid
  VARIANT 28: note = Any amino acid
  VARIANT 29: note = Any amino acid
  VARIANT 30: note = Any amino acid
  VARIANT 31: note = Any amino acid
  VARIANT 32: note = Any amino acid
  VARIANT 33: note = Any amino acid
  VARIANT 34: note = Any amino acid
  VARIANT 35: note = Any amino acid
  VARIANT 36: note = Any amino acid
  VARIANT 37: note = Any amino acid
  VARIANT 38: note = Any amino acid
  VARIANT 39: note = Any amino acid
  VARIANT 40: note = Any amino acid
  VARIANT 41: note = Any amino acid
  VARIANT 42: note = Any amino acid
  VARIANT 43: note = Any amino acid
  VARIANT 44: note = Any amino acid
  VARIANT 45: note = Any amino acid
  VARIANT 46: note = Any amino acid
  VARIANT 48: note = Any amino acid
  VARIANT 49: note = Any amino acid
  VARIANT 50: note = Any amino acid
  VARIANT 51: note = Any amino acid
  VARIANT 52: note = Any amino acid
  VARIANT 53: note = Any amino acid
  VARIANT 54: note = Any amino acid
  VARIANT 55: note = Any amino acid
  VARIANT 56: note = Any amino acid
  VARIANT 57: note = Any amino acid
  VARIANT 58: note = Any amino acid
  VARIANT 59: note = Any amino acid
  VARIANT 60: note = Any amino acid
  VARIANT 61: note = Any amino acid
  VARIANT 62: note = Any amino acid
  VARIANT 63: note = Any amino acid
  VARIANT 64: note = Any amino acid
  VARIANT 65: note = Any amino acid
  VARIANT 66: note = Any amino acid
  VARIANT 67: note = Any amino acid
  VARIANT 68: note = Any amino acid
  VARIANT 69: note = Any amino acid
  VARIANT 70: note = Any amino acid
  VARIANT 71: note = Any amino acid
  VARIANT 72: note = Any amino acid
  VARIANT 73: note = Any amino acid
  VARIANT 74: note = Any amino acid
  VARIANT 75: note = Any amino acid
  VARIANT 76: note = Any amino acid
  VARIANT 77: note = Any amino acid
  VARIANT 78: note = Any amino acid
  VARIANT 79: note = Any amino acid
  VARIANT 80: note = Any amino acid
  VARIANT 81: note = Any amino acid
  VARIANT 82: note = Any amino acid
  VARIANT 83: note = Any amino acid
  VARIANT 84: note = Any amino acid
  VARIANT 85: note = Any amino acid
  VARIANT 86: note = Any amino acid
  VARIANT 87: note = Any amino acid
  VARIANT 89: note = Any amino acid
  VARIANT 91: note = Any amino acid
  VARIANT 92: note = Any amino acid
DXXXXXXXXXXXXXXXXXXXXXXXXXXXXXXXXXXXXXXXXXXXXXEXXXXXXXXXXXXXXXXXXXXXXXXXXXXXXXXXXXXXXXXKXDXXD

SEQ ID NO: 795669 - protein, 92 aa, unidentified
  VARIANT 2: note = Any amino acid
  VARIANT 3: note = Any amino acid
  VARIANT 4: note = Any amino acid
  VARIANT 5: note = Any amino acid
  VARIANT 6: note = Any amino acid
  VARIANT 7: note = Any amino acid
  VARIANT 8: note = Any amino acid
  VARIANT 9: note = Any amino acid
  VARIANT 10: note = Any amino acid
  VARIANT 11: note = Any amino acid
  VARIANT 12: note = Any amino acid
  VARIANT 13: note = Any amino acid
  VARIANT 14: note = Any amino acid
  VARIANT 15: note = Any amino acid
  VARIANT 16: note = Any amino acid
  VARIANT 17: note = Any amino acid
  VARIANT 18: note = Any amino acid
  VARIANT 19: note = Any amino acid
  VARIANT 20: note = Any amino acid
  VARIANT 21: note = Any amino acid
  VARIANT 22: note = Any amino acid
  VARIANT 23: note = Any amino acid
  VARIANT 24: note = Any amino acid
  VARIANT 25: note = Any amino acid
  VARIANT 26: note = Any amino acid
  VARIANT 27: note = Any amino acid
  VARIANT 28: note = Any amino acid
  VARIANT 29: note = Any amino acid
  VARIANT 30: note = Any amino acid
  VARIANT 31: note = Any amino acid
  VARIANT 32: note = Any amino acid
  VARIANT 33: note = Any amino acid
  VARIANT 34: note = Any amino acid
  VARIANT 35: note = Any amino acid
  VARIANT 36: note = Any amino acid
  VARIANT 37: note = Any amino acid
  VARIANT 38: note = Any amino acid
  VARIANT 39: note = Any amino acid
  VARIANT 40: note = Any amino acid
  VARIANT 41: note = Any amino acid
  VARIANT 42: note = Any amino acid
  VARIANT 43: note = Any amino acid
  VARIANT 44: note = Any amino acid
  VARIANT 45: note = Any amino acid
  VARIANT 46: note = Any amino acid
  VARIANT 48: note = Any amino acid
  VARIANT 49: note = Any amino acid
  VARIANT 50: note = Any amino acid
  VARIANT 51: note = Any amino acid
  VARIANT 52: note = Any amino acid
  VARIANT 53: note = Any amino acid
  VARIANT 54: note = Any amino acid
  VARIANT 55: note = Any amino acid
  VARIANT 56: note = Any amino acid
  VARIANT 57: note = Any amino acid
  VARIANT 58: note = Any amino acid
  VARIANT 59: note = Any amino acid
  VARIANT 60: note = Any amino acid
  VARIANT 61: note = Any amino acid
  VARIANT 62: note = Any amino acid
  VARIANT 63: note = Any amino acid
  VARIANT 64: note = Any amino acid
  VARIANT 65: note = Any amino acid
  VARIANT 66: note = Any amino acid
  VARIANT 67: note = Any amino acid
  VARIANT 68: note = Any amino acid
  VARIANT 69: note = Any amino acid
  VARIANT 70: note = Any amino acid
  VARIANT 71: note = Any amino acid
  VARIANT 72: note = Any amino acid
  VARIANT 73: note = Any amino acid
  VARIANT 74: note = Any amino acid
  VARIANT 75: note = Any amino acid
  VARIANT 76: note = Any amino acid
  VARIANT 77: note = Any amino acid
  VARIANT 78: note = Any amino acid
  VARIANT 79: note = Any amino acid
  VARIANT 80: note = Any amino acid
  VARIANT 81: note = Any amino acid
  VARIANT 82: note = Any amino acid
  VARIANT 83: note = Any amino acid
  VARIANT 84: note = Any amino acid
  VARIANT 85: note = Any amino acid
  VARIANT 86: note = Any amino acid
  VARIANT 88: note = Any amino acid
  VARIANT 90: note = Any amino acid
  VARIANT 91: note = Any amino acid
DXXXXXXXXXXXXXXXXXXXXXXXXXXXXXXXXXXXXXXXXXXXXXAXXXXXXXXXXXXXXXXXXXXXXXXXXXXXXXXXXXXXXXKXDXXD

SEQ ID NO: 795670 - protein, 88 aa, unidentified
  VARIANT 2: note = Any amino acid
  VARIANT 3: note = Any amino acid
  VARIANT 4: note = Any amino acid
  VARIANT 5: note = Any amino acid
  VARIANT 6: note = Any amino acid
  VARIANT 7: note = Any amino acid
  VARIANT 8: note = Any amino acid
  VARIANT 9: note = Any amino acid
  VARIANT 10: note = Any amino acid
  VARIANT 11: note = Any amino acid
  VARIANT 12: note = Any amino acid
  VARIANT 13: note = Any amino acid
  VARIANT 14: note = Any amino acid
  VARIANT 15: note = Any amino acid
  VARIANT 16: note = Any amino acid
  VARIANT 17: note = Any amino acid
  VARIANT 18: note = Any amino acid
  VARIANT 19: note = Any amino acid
  VARIANT 20: note = Any amino acid
  VARIANT 21: note = Any amino acid
  VARIANT 22: note = Any amino acid
  VARIANT 23: note = Any amino acid
  VARIANT 24: note = Any amino acid
  VARIANT 25: note = Any amino acid
  VARIANT 26: note = Any amino acid
  VARIANT 27: note = Any amino acid
  VARIANT 28: note = Any amino acid
  VARIANT 29: note = Any amino acid
  VARIANT 30: note = Any amino acid
  VARIANT 31: note = Any amino acid
  VARIANT 32: note = Any amino acid
  VARIANT 33: note = Any amino acid
  VARIANT 34: note = Any amino acid
  VARIANT 35: note = Any amino acid
  VARIANT 36: note = Any amino acid
  VARIANT 37: note = Any amino acid
  VARIANT 38: note = Any amino acid
  VARIANT 39: note = Any amino acid
  VARIANT 40: note = Any amino acid
  VARIANT 41: note = Any amino acid
  VARIANT 42: note = Any amino acid
  VARIANT 43: note = Any amino acid
  VARIANT 44: note = Any amino acid
  VARIANT 45: note = Any amino acid
  VARIANT 46: note = Any amino acid
  VARIANT 47: note = Any amino acid
  VARIANT 49: note = Any amino acid
  VARIANT 50: note = Any amino acid
  VARIANT 51: note = Any amino acid
  VARIANT 52: note = Any amino acid
  VARIANT 53: note = Any amino acid
  VARIANT 54: note = Any amino acid
  VARIANT 55: note = Any amino acid
  VARIANT 56: note = Any amino acid
  VARIANT 57: note = Any amino acid
  VARIANT 58: note = Any amino acid
  VARIANT 59: note = Any amino acid
  VARIANT 60: note = Any amino acid
  VARIANT 61: note = Any amino acid
  VARIANT 62: note = Any amino acid
  VARIANT 63: note = Any amino acid
  VARIANT 64: note = Any amino acid
  VARIANT 65: note = Any amino acid
  VARIANT 66: note = Any amino acid
  VARIANT 67: note = Any amino acid
  VARIANT 68: note = Any amino acid
  VARIANT 69: note = Any amino acid
  VARIANT 70: note = Any amino acid
  VARIANT 71: note = Any amino acid
  VARIANT 72: note = Any amino acid
  VARIANT 73: note = Any amino acid
  VARIANT 74: note = Any amino acid
  VARIANT 75: note = Any amino acid
  VARIANT 76: note = Any amino acid
  VARIANT 77: note = Any amino acid
  VARIANT 78: note = Any amino acid
  VARIANT 79: note = Any amino acid
  VARIANT 80: note = Any amino acid
  VARIANT 81: note = Any amino acid
  VARIANT 82: note = Any amino acid
  VARIANT 84: note = Any amino acid
  VARIANT 86: note = Any amino acid
  VARIANT 87: note = Any amino acid
DXXXXXXXXXXXXXXXXXXXXXXXXXXXXXXXXXXXXXXXXXXXXXXEXXXXXXXXXXXXXXXXXXXXXXXXXXXXXXXXXXRXDXXE

SEQ ID NO: 795671 - protein, 92 aa, unidentified
  VARIANT 2: note = Any amino acid
  VARIANT 3: note = Any amino acid
  VARIANT 4: note = Any amino acid
  VARIANT 5: note = Any amino acid
  VARIANT 6: note = Any amino acid
  VARIANT 7: note = Any amino acid
  VARIANT 8: note = Any amino acid
  VARIANT 9: note = Any amino acid
  VARIANT 10: note = Any amino acid
  VARIANT 11: note = Any amino acid
  VARIANT 12: note = Any amino acid
  VARIANT 13: note = Any amino acid
  VARIANT 14: note = Any amino acid
  VARIANT 15: note = Any amino acid
  VARIANT 16: note = Any amino acid
  VARIANT 17: note = Any amino acid
  VARIANT 18: note = Any amino acid
  VARIANT 19: note = Any amino acid
  VARIANT 20: note = Any amino acid
  VARIANT 21: note = Any amino acid
  VARIANT 22: note = Any amino acid
  VARIANT 23: note = Any amino acid
  VARIANT 24: note = Any amino acid
  VARIANT 25: note = Any amino acid
  VARIANT 26: note = Any amino acid
  VARIANT 27: note = Any amino acid
  VARIANT 28: note = Any amino acid
  VARIANT 29: note = Any amino acid
  VARIANT 30: note = Any amino acid
  VARIANT 31: note = Any amino acid
  VARIANT 32: note = Any amino acid
  VARIANT 33: note = Any amino acid
  VARIANT 34: note = Any amino acid
  VARIANT 35: note = Any amino acid
  VARIANT 36: note = Any amino acid
  VARIANT 37: note = Any amino acid
  VARIANT 38: note = Any amino acid
  VARIANT 39: note = Any amino acid
  VARIANT 40: note = Any amino acid
  VARIANT 41: note = Any amino acid
  VARIANT 42: note = Any amino acid
  VARIANT 43: note = Any amino acid
  VARIANT 44: note = Any amino acid
  VARIANT 45: note = Any amino acid
  VARIANT 46: note = Any amino acid
  VARIANT 47: note = Any amino acid
  VARIANT 48: note = Any amino acid
  VARIANT 49: note = Any amino acid
  VARIANT 51: note = Any amino acid
  VARIANT 52: note = Any amino acid
  VARIANT 53: note = Any amino acid
  VARIANT 54: note = Any amino acid
  VARIANT 55: note = Any amino acid
  VARIANT 56: note = Any amino acid
  VARIANT 57: note = Any amino acid
  VARIANT 58: note = Any amino acid
  VARIANT 59: note = Any amino acid
  VARIANT 60: note = Any amino acid
  VARIANT 61: note = Any amino acid
  VARIANT 62: note = Any amino acid
  VARIANT 63: note = Any amino acid
  VARIANT 64: note = Any amino acid
  VARIANT 65: note = Any amino acid
  VARIANT 66: note = Any amino acid
  VARIANT 67: note = Any amino acid
  VARIANT 68: note = Any amino acid
  VARIANT 69: note = Any amino acid
  VARIANT 70: note = Any amino acid
  VARIANT 71: note = Any amino acid
  VARIANT 72: note = Any amino acid
  VARIANT 73: note = Any amino acid
  VARIANT 74: note = Any amino acid
  VARIANT 75: note = Any amino acid
  VARIANT 76: note = Any amino acid
  VARIANT 77: note = Any amino acid
  VARIANT 78: note = Any amino acid
  VARIANT 79: note = Any amino acid
  VARIANT 80: note = Any amino acid
  VARIANT 81: note = Any amino acid
  VARIANT 82: note = Any amino acid
  VARIANT 83: note = Any amino acid
  VARIANT 84: note = Any amino acid
  VARIANT 85: note = Any amino acid
  VARIANT 86: note = Any amino acid
  VARIANT 88: note = Any amino acid
  VARIANT 90: note = Any amino acid
  VARIANT 91: note = Any amino acid
DXXXXXXXXXXXXXXXXXXXXXXXXXXXXXXXXXXXXXXXXXXXXXXXXEXXXXXXXXXXXXXXXXXXXXXXXXXXXXXXXXXXXXKXDXXD

SEQ ID NO: 795672 - protein, 109 aa, unidentified
  VARIANT 2: note = Any amino acid
  VARIANT 3: note = Any amino acid
  VARIANT 4: note = Any amino acid
  VARIANT 5: note = Any amino acid
  VARIANT 6: note = Any amino acid
  VARIANT 7: note = Any amino acid
  VARIANT 8: note = Any amino acid
  VARIANT 9: note = Any amino acid
  VARIANT 10: note = Any amino acid
  VARIANT 11: note = Any amino acid
  VARIANT 12: note = Any amino acid
  VARIANT 13: note = Any amino acid
  VARIANT 14: note = Any amino acid
  VARIANT 15: note = Any amino acid
  VARIANT 16: note = Any amino acid
  VARIANT 17: note = Any amino acid
  VARIANT 18: note = Any amino acid
  VARIANT 19: note = Any amino acid
  VARIANT 20: note = Any amino acid
  VARIANT 21: note = Any amino acid
  VARIANT 22: note = Any amino acid
  VARIANT 23: note = Any amino acid
  VARIANT 24: note = Any amino acid
  VARIANT 25: note = Any amino acid
  VARIANT 26: note = Any amino acid
  VARIANT 27: note = Any amino acid
  VARIANT 28: note = Any amino acid
  VARIANT 29: note = Any amino acid
  VARIANT 30: note = Any amino acid
  VARIANT 31: note = Any amino acid
  VARIANT 32: note = Any amino acid
  VARIANT 33: note = Any amino acid
  VARIANT 34: note = Any amino acid
  VARIANT 35: note = Any amino acid
  VARIANT 36: note = Any amino acid
  VARIANT 37: note = Any amino acid
  VARIANT 38: note = Any amino acid
  VARIANT 39: note = Any amino acid
  VARIANT 40: note = Any amino acid
  VARIANT 41: note = Any amino acid
  VARIANT 42: note = Any amino acid
  VARIANT 43: note = Any amino acid
  VARIANT 44: note = Any amino acid
  VARIANT 45: note = Any amino acid
  VARIANT 46: note = Any amino acid
  VARIANT 47: note = Any amino acid
  VARIANT 48: note = Any amino acid
  VARIANT 49: note = Any amino acid
  VARIANT 50: note = Any amino acid
  VARIANT 51: note = Any amino acid
  VARIANT 52: note = Any amino acid
  VARIANT 53: note = Any amino acid
  VARIANT 54: note = Any amino acid
  VARIANT 55: note = Any amino acid
  VARIANT 56: note = Any amino acid
  VARIANT 58: note = Any amino acid
  VARIANT 59: note = Any amino acid
  VARIANT 60: note = Any amino acid
  VARIANT 61: note = Any amino acid
  VARIANT 62: note = Any amino acid
  VARIANT 63: note = Any amino acid
  VARIANT 64: note = Any amino acid
  VARIANT 65: note = Any amino acid
  VARIANT 66: note = Any amino acid
  VARIANT 67: note = Any amino acid
  VARIANT 68: note = Any amino acid
  VARIANT 69: note = Any amino acid
  VARIANT 70: note = Any amino acid
  VARIANT 71: note = Any amino acid
  VARIANT 72: note = Any amino acid
  VARIANT 73: note = Any amino acid
  VARIANT 74: note = Any amino acid
  VARIANT 75: note = Any amino acid
  VARIANT 76: note = Any amino acid
  VARIANT 77: note = Any amino acid
  VARIANT 78: note = Any amino acid
  VARIANT 79: note = Any amino acid
  VARIANT 80: note = Any amino acid
  VARIANT 81: note = Any amino acid
  VARIANT 82: note = Any amino acid
  VARIANT 83: note = Any amino acid
  VARIANT 84: note = Any amino acid
  VARIANT 85: note = Any amino acid
  VARIANT 86: note = Any amino acid
  VARIANT 87: note = Any amino acid
  VARIANT 88: note = Any amino acid
  VARIANT 89: note = Any amino acid
  VARIANT 90: note = Any amino acid
  VARIANT 91: note = Any amino acid
  VARIANT 92: note = Any amino acid
  VARIANT 93: note = Any amino acid
  VARIANT 94: note = Any amino acid
  VARIANT 95: note = Any amino acid
  VARIANT 96: note = Any amino acid
  VARIANT 97: note = Any amino acid
  VARIANT 98: note = Any amino acid
  VARIANT 99: note = Any amino acid
  VARIANT 100: note = Any amino acid
  VARIANT 101: note = Any amino acid
  VARIANT 102: note = Any amino acid
  VARIANT 103: note = Any amino acid
  VARIANT 105: note = Any amino acid
  VARIANT 107: note = Any amino acid
  VARIANT 108: note = Any amino acid
DXXXXXXXXXXXXXXXXXXXXXXXXXXXXXXXXXXXXXXXXXXXXXXXXXXXXXXXEXXXXXXXXXXXXXXXXXXXXXXXXXXXXXXXXXXXXXXXXXXXXXXKXDXXD

SEQ ID NO: 795673 - protein, 94 aa, unidentified
  VARIANT 2: note = Any amino acid
  VARIANT 3: note = Any amino acid
  VARIANT 4: note = Any amino acid
  VARIANT 5: note = Any amino acid
  VARIANT 6: note = Any amino acid
  VARIANT 7: note = Any amino acid
  VARIANT 8: note = Any amino acid
  VARIANT 9: note = Any amino acid
  VARIANT 10: note = Any amino acid
  VARIANT 11: note = Any amino acid
  VARIANT 12: note = Any amino acid
  VARIANT 13: note = Any amino acid
  VARIANT 14: note = Any amino acid
  VARIANT 15: note = Any amino acid
  VARIANT 16: note = Any amino acid
  VARIANT 17: note = Any amino acid
  VARIANT 18: note = Any amino acid
  VARIANT 19: note = Any amino acid
  VARIANT 20: note = Any amino acid
  VARIANT 21: note = Any amino acid
  VARIANT 22: note = Any amino acid
  VARIANT 23: note = Any amino acid
  VARIANT 24: note = Any amino acid
  VARIANT 25: note = Any amino acid
  VARIANT 26: note = Any amino acid
  VARIANT 27: note = Any amino acid
  VARIANT 28: note = Any amino acid
  VARIANT 29: note = Any amino acid
  VARIANT 30: note = Any amino acid
  VARIANT 31: note = Any amino acid
  VARIANT 32: note = Any amino acid
  VARIANT 33: note = Any amino acid
  VARIANT 34: note = Any amino acid
  VARIANT 35: note = Any amino acid
  VARIANT 36: note = Any amino acid
  VARIANT 37: note = Any amino acid
  VARIANT 38: note = Any amino acid
  VARIANT 39: note = Any amino acid
  VARIANT 40: note = Any amino acid
  VARIANT 41: note = Any amino acid
  VARIANT 42: note = Any amino acid
  VARIANT 43: note = Any amino acid
  VARIANT 44: note = Any amino acid
  VARIANT 45: note = Any amino acid
  VARIANT 46: note = Any amino acid
  VARIANT 47: note = Any amino acid
  VARIANT 48: note = Any amino acid
  VARIANT 49: note = Any amino acid
  VARIANT 50: note = Any amino acid
  VARIANT 51: note = Any amino acid
  VARIANT 53: note = Any amino acid
  VARIANT 54: note = Any amino acid
  VARIANT 55: note = Any amino acid
  VARIANT 56: note = Any amino acid
  VARIANT 57: note = Any amino acid
  VARIANT 58: note = Any amino acid
  VARIANT 59: note = Any amino acid
  VARIANT 60: note = Any amino acid
  VARIANT 61: note = Any amino acid
  VARIANT 62: note = Any amino acid
  VARIANT 63: note = Any amino acid
  VARIANT 64: note = Any amino acid
  VARIANT 65: note = Any amino acid
  VARIANT 66: note = Any amino acid
  VARIANT 67: note = Any amino acid
  VARIANT 68: note = Any amino acid
  VARIANT 69: note = Any amino acid
  VARIANT 70: note = Any amino acid
  VARIANT 71: note = Any amino acid
  VARIANT 72: note = Any amino acid
  VARIANT 73: note = Any amino acid
  VARIANT 74: note = Any amino acid
  VARIANT 75: note = Any amino acid
  VARIANT 76: note = Any amino acid
  VARIANT 77: note = Any amino acid
  VARIANT 78: note = Any amino acid
  VARIANT 79: note = Any amino acid
  VARIANT 80: note = Any amino acid
  VARIANT 81: note = Any amino acid
  VARIANT 82: note = Any amino acid
  VARIANT 83: note = Any amino acid
  VARIANT 84: note = Any amino acid
  VARIANT 85: note = Any amino acid
  VARIANT 86: note = Any amino acid
  VARIANT 87: note = Any amino acid
  VARIANT 88: note = Any amino acid
  VARIANT 90: note = Any amino acid
  VARIANT 92: note = Any amino acid
  VARIANT 93: note = Any amino acid
DXXXXXXXXXXXXXXXXXXXXXXXXXXXXXXXXXXXXXXXXXXXXXXXXXXEXXXXXXXXXXXXXXXXXXXXXXXXXXXXXXXXXXXXKXDXXD

SEQ ID NO: 795674 - protein, 100 aa, unidentified
  VARIANT 2: note = Any amino acid
  VARIANT 3: note = Any amino acid
  VARIANT 4: note = Any amino acid
  VARIANT 5: note = Any amino acid
  VARIANT 6: note = Any amino acid
  VARIANT 7: note = Any amino acid
  VARIANT 8: note = Any amino acid
  VARIANT 9: note = Any amino acid
  VARIANT 10: note = Any amino acid
  VARIANT 11: note = Any amino acid
  VARIANT 12: note = Any amino acid
  VARIANT 13: note = Any amino acid
  VARIANT 14: note = Any amino acid
  VARIANT 15: note = Any amino acid
  VARIANT 16: note = Any amino acid
  VARIANT 17: note = Any amino acid
  VARIANT 18: note = Any amino acid
  VARIANT 19: note = Any amino acid
  VARIANT 20: note = Any amino acid
  VARIANT 21: note = Any amino acid
  VARIANT 22: note = Any amino acid
  VARIANT 23: note = Any amino acid
  VARIANT 24: note = Any amino acid
  VARIANT 25: note = Any amino acid
  VARIANT 26: note = Any amino acid
  VARIANT 27: note = Any amino acid
  VARIANT 28: note = Any amino acid
  VARIANT 29: note = Any amino acid
  VARIANT 30: note = Any amino acid
  VARIANT 31: note = Any amino acid
  VARIANT 32: note = Any amino acid
  VARIANT 33: note = Any amino acid
  VARIANT 34: note = Any amino acid
  VARIANT 35: note = Any amino acid
  VARIANT 36: note = Any amino acid
  VARIANT 37: note = Any amino acid
  VARIANT 38: note = Any amino acid
  VARIANT 39: note = Any amino acid
  VARIANT 40: note = Any amino acid
  VARIANT 41: note = Any amino acid
  VARIANT 42: note = Any amino acid
  VARIANT 43: note = Any amino acid
  VARIANT 44: note = Any amino acid
  VARIANT 45: note = Any amino acid
  VARIANT 46: note = Any amino acid
  VARIANT 47: note = Any amino acid
  VARIANT 48: note = Any amino acid
  VARIANT 49: note = Any amino acid
  VARIANT 50: note = Any amino acid
  VARIANT 51: note = Any amino acid
  VARIANT 52: note = Any amino acid
  VARIANT 53: note = Any amino acid
  VARIANT 54: note = Any amino acid
  VARIANT 55: note = Any amino acid
  VARIANT 56: note = Any amino acid
  VARIANT 57: note = Any amino acid
  VARIANT 58: note = Any amino acid
  VARIANT 60: note = Any amino acid
  VARIANT 61: note = Any amino acid
  VARIANT 62: note = Any amino acid
  VARIANT 63: note = Any amino acid
  VARIANT 64: note = Any amino acid
  VARIANT 65: note = Any amino acid
  VARIANT 66: note = Any amino acid
  VARIANT 67: note = Any amino acid
  VARIANT 68: note = Any amino acid
  VARIANT 69: note = Any amino acid
  VARIANT 70: note = Any amino acid
  VARIANT 71: note = Any amino acid
  VARIANT 72: note = Any amino acid
  VARIANT 73: note = Any amino acid
  VARIANT 74: note = Any amino acid
  VARIANT 75: note = Any amino acid
  VARIANT 76: note = Any amino acid
  VARIANT 77: note = Any amino acid
  VARIANT 78: note = Any amino acid
  VARIANT 79: note = Any amino acid
  VARIANT 80: note = Any amino acid
  VARIANT 81: note = Any amino acid
  VARIANT 82: note = Any amino acid
  VARIANT 83: note = Any amino acid
  VARIANT 84: note = Any amino acid
  VARIANT 85: note = Any amino acid
  VARIANT 86: note = Any amino acid
  VARIANT 87: note = Any amino acid
  VARIANT 88: note = Any amino acid
  VARIANT 89: note = Any amino acid
  VARIANT 90: note = Any amino acid
  VARIANT 91: note = Any amino acid
  VARIANT 92: note = Any amino acid
  VARIANT 93: note = Any amino acid
  VARIANT 94: note = Any amino acid
  VARIANT 96: note = Any amino acid
  VARIANT 98: note = Any amino acid
  VARIANT 99: note = Any amino acid
DXXXXXXXXXXXXXXXXXXXXXXXXXXXXXXXXXXXXXXXXXXXXXXXXXXXXXXXXXEXXXXXXXXXXXXXXXXXXXXXXXXXXXXXXXXXXXKXDXXD

SEQ ID NO: 795675 - protein, 97 aa, unidentified
  VARIANT 2: note = Any amino acid
  VARIANT 3: note = Any amino acid
  VARIANT 4: note = Any amino acid
  VARIANT 5: note = Any amino acid
  VARIANT 6: note = Any amino acid
  VARIANT 7: note = Any amino acid
  VARIANT 8: note = Any amino acid
  VARIANT 9: note = Any amino acid
  VARIANT 10: note = Any amino acid
  VARIANT 11: note = Any amino acid
  VARIANT 12: note = Any amino acid
  VARIANT 13: note = Any amino acid
  VARIANT 14: note = Any amino acid
  VARIANT 15: note = Any amino acid
  VARIANT 16: note = Any amino acid
  VARIANT 17: note = Any amino acid
  VARIANT 18: note = Any amino acid
  VARIANT 19: note = Any amino acid
  VARIANT 20: note = Any amino acid
  VARIANT 21: note = Any amino acid
  VARIANT 22: note = Any amino acid
  VARIANT 23: note = Any amino acid
  VARIANT 24: note = Any amino acid
  VARIANT 25: note = Any amino acid
  VARIANT 26: note = Any amino acid
  VARIANT 27: note = Any amino acid
  VARIANT 28: note = Any amino acid
  VARIANT 29: note = Any amino acid
  VARIANT 30: note = Any amino acid
  VARIANT 31: note = Any amino acid
  VARIANT 32: note = Any amino acid
  VARIANT 33: note = Any amino acid
  VARIANT 34: note = Any amino acid
  VARIANT 35: note = Any amino acid
  VARIANT 36: note = Any amino acid
  VARIANT 37: note = Any amino acid
  VARIANT 38: note = Any amino acid
  VARIANT 39: note = Any amino acid
  VARIANT 40: note = Any amino acid
  VARIANT 41: note = Any amino acid
  VARIANT 42: note = Any amino acid
  VARIANT 43: note = Any amino acid
  VARIANT 44: note = Any amino acid
  VARIANT 45: note = Any amino acid
  VARIANT 46: note = Any amino acid
  VARIANT 47: note = Any amino acid
  VARIANT 48: note = Any amino acid
  VARIANT 49: note = Any amino acid
  VARIANT 50: note = Any amino acid
  VARIANT 52: note = Any amino acid
  VARIANT 53: note = Any amino acid
  VARIANT 54: note = Any amino acid
  VARIANT 55: note = Any amino acid
  VARIANT 56: note = Any amino acid
  VARIANT 57: note = Any amino acid
  VARIANT 58: note = Any amino acid
  VARIANT 59: note = Any amino acid
  VARIANT 60: note = Any amino acid
  VARIANT 61: note = Any amino acid
  VARIANT 62: note = Any amino acid
  VARIANT 63: note = Any amino acid
  VARIANT 64: note = Any amino acid
  VARIANT 65: note = Any amino acid
  VARIANT 66: note = Any amino acid
  VARIANT 67: note = Any amino acid
  VARIANT 68: note = Any amino acid
  VARIANT 69: note = Any amino acid
  VARIANT 70: note = Any amino acid
  VARIANT 71: note = Any amino acid
  VARIANT 72: note = Any amino acid
  VARIANT 73: note = Any amino acid
  VARIANT 74: note = Any amino acid
  VARIANT 75: note = Any amino acid
  VARIANT 76: note = Any amino acid
  VARIANT 77: note = Any amino acid
  VARIANT 78: note = Any amino acid
  VARIANT 79: note = Any amino acid
  VARIANT 80: note = Any amino acid
  VARIANT 81: note = Any amino acid
  VARIANT 82: note = Any amino acid
  VARIANT 83: note = Any amino acid
  VARIANT 84: note = Any amino acid
  VARIANT 85: note = Any amino acid
  VARIANT 86: note = Any amino acid
  VARIANT 87: note = Any amino acid
  VARIANT 88: note = Any amino acid
  VARIANT 89: note = Any amino acid
  VARIANT 90: note = Any amino acid
  VARIANT 91: note = Any amino acid
  VARIANT 93: note = Any amino acid
  VARIANT 95: note = Any amino acid
  VARIANT 96: note = Any amino acid
DXXXXXXXXXXXXXXXXXXXXXXXXXXXXXXXXXXXXXXXXXXXXXXXXXVXXXXXXXXXXXXXXXXXXXXXXXXXXXXXXXXXXXXXXXXKXDXXD

SEQ ID NO: 795676 - protein, 105 aa, unidentified
  VARIANT 2: note = Any amino acid
  VARIANT 3: note = Any amino acid
  VARIANT 4: note = Any amino acid
  VARIANT 5: note = Any amino acid
  VARIANT 6: note = Any amino acid
  VARIANT 7: note = Any amino acid
  VARIANT 8: note = Any amino acid
  VARIANT 9: note = Any amino acid
  VARIANT 10: note = Any amino acid
  VARIANT 11: note = Any amino acid
  VARIANT 12: note = Any amino acid
  VARIANT 13: note = Any amino acid
  VARIANT 14: note = Any amino acid
  VARIANT 15: note = Any amino acid
  VARIANT 16: note = Any amino acid
  VARIANT 17: note = Any amino acid
  VARIANT 18: note = Any amino acid
  VARIANT 19: note = Any amino acid
  VARIANT 20: note = Any amino acid
  VARIANT 21: note = Any amino acid
  VARIANT 22: note = Any amino acid
  VARIANT 23: note = Any amino acid
  VARIANT 24: note = Any amino acid
  VARIANT 25: note = Any amino acid
  VARIANT 26: note = Any amino acid
  VARIANT 27: note = Any amino acid
  VARIANT 28: note = Any amino acid
  VARIANT 29: note = Any amino acid
  VARIANT 30: note = Any amino acid
  VARIANT 31: note = Any amino acid
  VARIANT 32: note = Any amino acid
  VARIANT 33: note = Any amino acid
  VARIANT 34: note = Any amino acid
  VARIANT 35: note = Any amino acid
  VARIANT 36: note = Any amino acid
  VARIANT 37: note = Any amino acid
  VARIANT 38: note = Any amino acid
  VARIANT 39: note = Any amino acid
  VARIANT 40: note = Any amino acid
  VARIANT 41: note = Any amino acid
  VARIANT 42: note = Any amino acid
  VARIANT 43: note = Any amino acid
  VARIANT 44: note = Any amino acid
  VARIANT 45: note = Any amino acid
  VARIANT 46: note = Any amino acid
  VARIANT 47: note = Any amino acid
  VARIANT 48: note = Any amino acid
  VARIANT 49: note = Any amino acid
  VARIANT 50: note = Any amino acid
  VARIANT 51: note = Any amino acid
  VARIANT 52: note = Any amino acid
  VARIANT 53: note = Any amino acid
  VARIANT 54: note = Any amino acid
  VARIANT 55: note = Any amino acid
  VARIANT 57: note = Any amino acid
  VARIANT 58: note = Any amino acid
  VARIANT 59: note = Any amino acid
  VARIANT 60: note = Any amino acid
  VARIANT 61: note = Any amino acid
  VARIANT 62: note = Any amino acid
  VARIANT 63: note = Any amino acid
  VARIANT 64: note = Any amino acid
  VARIANT 65: note = Any amino acid
  VARIANT 66: note = Any amino acid
  VARIANT 67: note = Any amino acid
  VARIANT 68: note = Any amino acid
  VARIANT 69: note = Any amino acid
  VARIANT 70: note = Any amino acid
  VARIANT 71: note = Any amino acid
  VARIANT 72: note = Any amino acid
  VARIANT 73: note = Any amino acid
  VARIANT 74: note = Any amino acid
  VARIANT 75: note = Any amino acid
  VARIANT 76: note = Any amino acid
  VARIANT 77: note = Any amino acid
  VARIANT 78: note = Any amino acid
  VARIANT 79: note = Any amino acid
  VARIANT 80: note = Any amino acid
  VARIANT 81: note = Any amino acid
  VARIANT 82: note = Any amino acid
  VARIANT 83: note = Any amino acid
  VARIANT 84: note = Any amino acid
  VARIANT 85: note = Any amino acid
  VARIANT 86: note = Any amino acid
  VARIANT 87: note = Any amino acid
  VARIANT 88: note = Any amino acid
  VARIANT 89: note = Any amino acid
  VARIANT 90: note = Any amino acid
  VARIANT 91: note = Any amino acid
  VARIANT 92: note = Any amino acid
  VARIANT 93: note = Any amino acid
  VARIANT 94: note = Any amino acid
  VARIANT 95: note = Any amino acid
  VARIANT 96: note = Any amino acid
  VARIANT 97: note = Any amino acid
  VARIANT 98: note = Any amino acid
  VARIANT 99: note = Any amino acid
  VARIANT 101: note = Any amino acid
  VARIANT 103: note = Any amino acid
  VARIANT 104: note = Any amino acid
DXXXXXXXXXXXXXXXXXXXXXXXXXXXXXXXXXXXXXXXXXXXXXXXXXXXXXXEXXXXXXXXXXXXXXXXXXXXXXXXXXXXXXXXXXXXXXXXXXXVXDXXS

SEQ ID NO: 795677 - protein, 102 aa, unidentified
  VARIANT 2: note = Any amino acid
  VARIANT 3: note = Any amino acid
  VARIANT 4: note = Any amino acid
  VARIANT 5: note = Any amino acid
  VARIANT 6: note = Any amino acid
  VARIANT 7: note = Any amino acid
  VARIANT 8: note = Any amino acid
  VARIANT 9: note = Any amino acid
  VARIANT 10: note = Any amino acid
  VARIANT 11: note = Any amino acid
  VARIANT 12: note = Any amino acid
  VARIANT 13: note = Any amino acid
  VARIANT 14: note = Any amino acid
  VARIANT 15: note = Any amino acid
  VARIANT 16: note = Any amino acid
  VARIANT 17: note = Any amino acid
  VARIANT 18: note = Any amino acid
  VARIANT 19: note = Any amino acid
  VARIANT 20: note = Any amino acid
  VARIANT 21: note = Any amino acid
  VARIANT 22: note = Any amino acid
  VARIANT 23: note = Any amino acid
  VARIANT 24: note = Any amino acid
  VARIANT 25: note = Any amino acid
  VARIANT 26: note = Any amino acid
  VARIANT 27: note = Any amino acid
  VARIANT 28: note = Any amino acid
  VARIANT 29: note = Any amino acid
  VARIANT 30: note = Any amino acid
  VARIANT 31: note = Any amino acid
  VARIANT 32: note = Any amino acid
  VARIANT 33: note = Any amino acid
  VARIANT 34: note = Any amino acid
  VARIANT 35: note = Any amino acid
  VARIANT 36: note = Any amino acid
  VARIANT 37: note = Any amino acid
  VARIANT 38: note = Any amino acid
  VARIANT 39: note = Any amino acid
  VARIANT 40: note = Any amino acid
  VARIANT 41: note = Any amino acid
  VARIANT 42: note = Any amino acid
  VARIANT 43: note = Any amino acid
  VARIANT 44: note = Any amino acid
  VARIANT 45: note = Any amino acid
  VARIANT 46: note = Any amino acid
  VARIANT 47: note = Any amino acid
  VARIANT 48: note = Any amino acid
  VARIANT 49: note = Any amino acid
  VARIANT 50: note = Any amino acid
  VARIANT 51: note = Any amino acid
  VARIANT 52: note = Any amino acid
  VARIANT 53: note = Any amino acid
  VARIANT 54: note = Any amino acid
  VARIANT 55: note = Any amino acid
  VARIANT 56: note = Any amino acid
  VARIANT 58: note = Any amino acid
  VARIANT 59: note = Any amino acid
  VARIANT 60: note = Any amino acid
  VARIANT 61: note = Any amino acid
  VARIANT 62: note = Any amino acid
  VARIANT 63: note = Any amino acid
  VARIANT 64: note = Any amino acid
  VARIANT 65: note = Any amino acid
  VARIANT 66: note = Any amino acid
  VARIANT 67: note = Any amino acid
  VARIANT 68: note = Any amino acid
  VARIANT 69: note = Any amino acid
  VARIANT 70: note = Any amino acid
  VARIANT 71: note = Any amino acid
  VARIANT 72: note = Any amino acid
  VARIANT 73: note = Any amino acid
  VARIANT 74: note = Any amino acid
  VARIANT 75: note = Any amino acid
  VARIANT 76: note = Any amino acid
  VARIANT 77: note = Any amino acid
  VARIANT 78: note = Any amino acid
  VARIANT 79: note = Any amino acid
  VARIANT 80: note = Any amino acid
  VARIANT 81: note = Any amino acid
  VARIANT 82: note = Any amino acid
  VARIANT 83: note = Any amino acid
  VARIANT 84: note = Any amino acid
  VARIANT 85: note = Any amino acid
  VARIANT 86: note = Any amino acid
  VARIANT 87: note = Any amino acid
  VARIANT 88: note = Any amino acid
  VARIANT 89: note = Any amino acid
  VARIANT 90: note = Any amino acid
  VARIANT 91: note = Any amino acid
  VARIANT 92: note = Any amino acid
  VARIANT 93: note = Any amino acid
  VARIANT 94: note = Any amino acid
  VARIANT 95: note = Any amino acid
  VARIANT 96: note = Any amino acid
  VARIANT 98: note = Any amino acid
  VARIANT 100: note = Any amino acid
  VARIANT 101: note = Any amino acid
DXXXXXXXXXXXXXXXXXXXXXXXXXXXXXXXXXXXXXXXXXXXXXXXXXXXXXXXEXXXXXXXXXXXXXXXXXXXXXXXXXXXXXXXXXXXXXXXIXDXXC

SEQ ID NO: 795678 - protein, 102 aa, unidentified
  VARIANT 2: note = Any amino acid
  VARIANT 3: note = Any amino acid
  VARIANT 4: note = Any amino acid
  VARIANT 5: note = Any amino acid
  VARIANT 6: note = Any amino acid
  VARIANT 7: note = Any amino acid
  VARIANT 8: note = Any amino acid
  VARIANT 9: note = Any amino acid
  VARIANT 10: note = Any amino acid
  VARIANT 11: note = Any amino acid
  VARIANT 12: note = Any amino acid
  VARIANT 13: note = Any amino acid
  VARIANT 14: note = Any amino acid
  VARIANT 15: note = Any amino acid
  VARIANT 16: note = Any amino acid
  VARIANT 17: note = Any amino acid
  VARIANT 18: note = Any amino acid
  VARIANT 19: note = Any amino acid
  VARIANT 20: note = Any amino acid
  VARIANT 21: note = Any amino acid
  VARIANT 22: note = Any amino acid
  VARIANT 23: note = Any amino acid
  VARIANT 24: note = Any amino acid
  VARIANT 25: note = Any amino acid
  VARIANT 26: note = Any amino acid
  VARIANT 27: note = Any amino acid
  VARIANT 28: note = Any amino acid
  VARIANT 29: note = Any amino acid
  VARIANT 30: note = Any amino acid
  VARIANT 31: note = Any amino acid
  VARIANT 32: note = Any amino acid
  VARIANT 33: note = Any amino acid
  VARIANT 34: note = Any amino acid
  VARIANT 35: note = Any amino acid
  VARIANT 36: note = Any amino acid
  VARIANT 37: note = Any amino acid
  VARIANT 38: note = Any amino acid
  VARIANT 39: note = Any amino acid
  VARIANT 40: note = Any amino acid
  VARIANT 41: note = Any amino acid
  VARIANT 42: note = Any amino acid
  VARIANT 43: note = Any amino acid
  VARIANT 44: note = Any amino acid
  VARIANT 45: note = Any amino acid
  VARIANT 46: note = Any amino acid
  VARIANT 47: note = Any amino acid
  VARIANT 48: note = Any amino acid
  VARIANT 49: note = Any amino acid
  VARIANT 50: note = Any amino acid
  VARIANT 51: note = Any amino acid
  VARIANT 52: note = Any amino acid
  VARIANT 53: note = Any amino acid
  VARIANT 54: note = Any amino acid
  VARIANT 56: note = Any amino acid
  VARIANT 57: note = Any amino acid
  VARIANT 58: note = Any amino acid
  VARIANT 59: note = Any amino acid
  VARIANT 60: note = Any amino acid
  VARIANT 61: note = Any amino acid
  VARIANT 62: note = Any amino acid
  VARIANT 63: note = Any amino acid
  VARIANT 64: note = Any amino acid
  VARIANT 65: note = Any amino acid
  VARIANT 66: note = Any amino acid
  VARIANT 67: note = Any amino acid
  VARIANT 68: note = Any amino acid
  VARIANT 69: note = Any amino acid
  VARIANT 70: note = Any amino acid
  VARIANT 71: note = Any amino acid
  VARIANT 72: note = Any amino acid
  VARIANT 73: note = Any amino acid
  VARIANT 74: note = Any amino acid
  VARIANT 75: note = Any amino acid
  VARIANT 76: note = Any amino acid
  VARIANT 77: note = Any amino acid
  VARIANT 78: note = Any amino acid
  VARIANT 79: note = Any amino acid
  VARIANT 80: note = Any amino acid
  VARIANT 81: note = Any amino acid
  VARIANT 82: note = Any amino acid
  VARIANT 83: note = Any amino acid
  VARIANT 84: note = Any amino acid
  VARIANT 85: note = Any amino acid
  VARIANT 86: note = Any amino acid
  VARIANT 87: note = Any amino acid
  VARIANT 88: note = Any amino acid
  VARIANT 89: note = Any amino acid
  VARIANT 90: note = Any amino acid
  VARIANT 91: note = Any amino acid
  VARIANT 92: note = Any amino acid
  VARIANT 93: note = Any amino acid
  VARIANT 94: note = Any amino acid
  VARIANT 95: note = Any amino acid
  VARIANT 96: note = Any amino acid
  VARIANT 98: note = Any amino acid
  VARIANT 100: note = Any amino acid
  VARIANT 101: note = Any amino acid
DXXXXXXXXXXXXXXXXXXXXXXXXXXXXXXXXXXXXXXXXXXXXXXXXXXXXXEXXXXXXXXXXXXXXXXXXXXXXXXXXXXXXXXXXXXXXXXXKXDXXD

SEQ ID NO: 795679 - protein, 97 aa, unidentified
  VARIANT 2: note = Any amino acid
  VARIANT 3: note = Any amino acid
  VARIANT 4: note = Any amino acid
  VARIANT 5: note = Any amino acid
  VARIANT 6: note = Any amino acid
  VARIANT 7: note = Any amino acid
  VARIANT 8: note = Any amino acid
  VARIANT 9: note = Any amino acid
  VARIANT 10: note = Any amino acid
  VARIANT 11: note = Any amino acid
  VARIANT 12: note = Any amino acid
  VARIANT 13: note = Any amino acid
  VARIANT 14: note = Any amino acid
  VARIANT 15: note = Any amino acid
  VARIANT 16: note = Any amino acid
  VARIANT 17: note = Any amino acid
  VARIANT 18: note = Any amino acid
  VARIANT 19: note = Any amino acid
  VARIANT 20: note = Any amino acid
  VARIANT 21: note = Any amino acid
  VARIANT 22: note = Any amino acid
  VARIANT 23: note = Any amino acid
  VARIANT 24: note = Any amino acid
  VARIANT 25: note = Any amino acid
  VARIANT 26: note = Any amino acid
  VARIANT 27: note = Any amino acid
  VARIANT 28: note = Any amino acid
  VARIANT 29: note = Any amino acid
  VARIANT 30: note = Any amino acid
  VARIANT 31: note = Any amino acid
  VARIANT 32: note = Any amino acid
  VARIANT 33: note = Any amino acid
  VARIANT 34: note = Any amino acid
  VARIANT 35: note = Any amino acid
  VARIANT 36: note = Any amino acid
  VARIANT 37: note = Any amino acid
  VARIANT 38: note = Any amino acid
  VARIANT 39: note = Any amino acid
  VARIANT 40: note = Any amino acid
  VARIANT 41: note = Any amino acid
  VARIANT 42: note = Any amino acid
  VARIANT 43: note = Any amino acid
  VARIANT 44: note = Any amino acid
  VARIANT 45: note = Any amino acid
  VARIANT 46: note = Any amino acid
  VARIANT 47: note = Any amino acid
  VARIANT 48: note = Any amino acid
  VARIANT 49: note = Any amino acid
  VARIANT 50: note = Any amino acid
  VARIANT 51: note = Any amino acid
  VARIANT 52: note = Any amino acid
  VARIANT 54: note = Any amino acid
  VARIANT 55: note = Any amino acid
  VARIANT 56: note = Any amino acid
  VARIANT 57: note = Any amino acid
  VARIANT 58: note = Any amino acid
  VARIANT 59: note = Any amino acid
  VARIANT 60: note = Any amino acid
  VARIANT 61: note = Any amino acid
  VARIANT 62: note = Any amino acid
  VARIANT 63: note = Any amino acid
  VARIANT 64: note = Any amino acid
  VARIANT 65: note = Any amino acid
  VARIANT 66: note = Any amino acid
  VARIANT 67: note = Any amino acid
  VARIANT 68: note = Any amino acid
  VARIANT 69: note = Any amino acid
  VARIANT 70: note = Any amino acid
  VARIANT 71: note = Any amino acid
  VARIANT 72: note = Any amino acid
  VARIANT 73: note = Any amino acid
  VARIANT 74: note = Any amino acid
  VARIANT 75: note = Any amino acid
  VARIANT 76: note = Any amino acid
  VARIANT 77: note = Any amino acid
  VARIANT 78: note = Any amino acid
  VARIANT 79: note = Any amino acid
  VARIANT 80: note = Any amino acid
  VARIANT 81: note = Any amino acid
  VARIANT 82: note = Any amino acid
  VARIANT 83: note = Any amino acid
  VARIANT 84: note = Any amino acid
  VARIANT 85: note = Any amino acid
  VARIANT 86: note = Any amino acid
  VARIANT 87: note = Any amino acid
  VARIANT 88: note = Any amino acid
  VARIANT 89: note = Any amino acid
  VARIANT 90: note = Any amino acid
  VARIANT 91: note = Any amino acid
  VARIANT 93: note = Any amino acid
  VARIANT 95: note = Any amino acid
  VARIANT 96: note = Any amino acid
DXXXXXXXXXXXXXXXXXXXXXXXXXXXXXXXXXXXXXXXXXXXXXXXXXXXEXXXXXXXXXXXXXXXXXXXXXXXXXXXXXXXXXXXXXXKXDXXD

SEQ ID NO: 795680 - protein, 94 aa, unidentified
  VARIANT 2: note = Any amino acid
  VARIANT 3: note = Any amino acid
  VARIANT 4: note = Any amino acid
  VARIANT 5: note = Any amino acid
  VARIANT 6: note = Any amino acid
  VARIANT 7: note = Any amino acid
  VARIANT 8: note = Any amino acid
  VARIANT 9: note = Any amino acid
  VARIANT 10: note = Any amino acid
  VARIANT 11: note = Any amino acid
  VARIANT 12: note = Any amino acid
  VARIANT 13: note = Any amino acid
  VARIANT 14: note = Any amino acid
  VARIANT 15: note = Any amino acid
  VARIANT 16: note = Any amino acid
  VARIANT 17: note = Any amino acid
  VARIANT 18: note = Any amino acid
  VARIANT 19: note = Any amino acid
  VARIANT 20: note = Any amino acid
  VARIANT 21: note = Any amino acid
  VARIANT 22: note = Any amino acid
  VARIANT 23: note = Any amino acid
  VARIANT 24: note = Any amino acid
  VARIANT 25: note = Any amino acid
  VARIANT 26: note = Any amino acid
  VARIANT 27: note = Any amino acid
  VARIANT 28: note = Any amino acid
  VARIANT 29: note = Any amino acid
  VARIANT 30: note = Any amino acid
  VARIANT 31: note = Any amino acid
  VARIANT 32: note = Any amino acid
  VARIANT 33: note = Any amino acid
  VARIANT 34: note = Any amino acid
  VARIANT 35: note = Any amino acid
  VARIANT 36: note = Any amino acid
  VARIANT 37: note = Any amino acid
  VARIANT 38: note = Any amino acid
  VARIANT 39: note = Any amino acid
  VARIANT 40: note = Any amino acid
  VARIANT 41: note = Any amino acid
  VARIANT 42: note = Any amino acid
  VARIANT 43: note = Any amino acid
  VARIANT 44: note = Any amino acid
  VARIANT 45: note = Any amino acid
  VARIANT 46: note = Any amino acid
  VARIANT 47: note = Any amino acid
  VARIANT 48: note = Any amino acid
  VARIANT 50: note = Any amino acid
  VARIANT 51: note = Any amino acid
  VARIANT 52: note = Any amino acid
  VARIANT 53: note = Any amino acid
  VARIANT 54: note = Any amino acid
  VARIANT 55: note = Any amino acid
  VARIANT 56: note = Any amino acid
  VARIANT 57: note = Any amino acid
  VARIANT 58: note = Any amino acid
  VARIANT 59: note = Any amino acid
  VARIANT 60: note = Any amino acid
  VARIANT 61: note = Any amino acid
  VARIANT 62: note = Any amino acid
  VARIANT 63: note = Any amino acid
  VARIANT 64: note = Any amino acid
  VARIANT 65: note = Any amino acid
  VARIANT 66: note = Any amino acid
  VARIANT 67: note = Any amino acid
  VARIANT 68: note = Any amino acid
  VARIANT 69: note = Any amino acid
  VARIANT 70: note = Any amino acid
  VARIANT 71: note = Any amino acid
  VARIANT 72: note = Any amino acid
  VARIANT 73: note = Any amino acid
  VARIANT 74: note = Any amino acid
  VARIANT 75: note = Any amino acid
  VARIANT 76: note = Any amino acid
  VARIANT 77: note = Any amino acid
  VARIANT 78: note = Any amino acid
  VARIANT 79: note = Any amino acid
  VARIANT 80: note = Any amino acid
  VARIANT 81: note = Any amino acid
  VARIANT 82: note = Any amino acid
  VARIANT 83: note = Any amino acid
  VARIANT 84: note = Any amino acid
  VARIANT 85: note = Any amino acid
  VARIANT 86: note = Any amino acid
  VARIANT 87: note = Any amino acid
  VARIANT 88: note = Any amino acid
  VARIANT 90: note = Any amino acid
  VARIANT 92: note = Any amino acid
  VARIANT 93: note = Any amino acid
DXXXXXXXXXXXXXXXXXXXXXXXXXXXXXXXXXXXXXXXXXXXXXXXEXXXXXXXXXXXXXXXXXXXXXXXXXXXXXXXXXXXXXXXKXNXXD

SEQ ID NO: 795681 - protein, 95 aa, unidentified
  VARIANT 2: note = Any amino acid
  VARIANT 3: note = Any amino acid
  VARIANT 4: note = Any amino acid
  VARIANT 5: note = Any amino acid
  VARIANT 6: note = Any amino acid
  VARIANT 7: note = Any amino acid
  VARIANT 8: note = Any amino acid
  VARIANT 9: note = Any amino acid
  VARIANT 10: note = Any amino acid
  VARIANT 11: note = Any amino acid
  VARIANT 12: note = Any amino acid
  VARIANT 13: note = Any amino acid
  VARIANT 14: note = Any amino acid
  VARIANT 15: note = Any amino acid
  VARIANT 16: note = Any amino acid
  VARIANT 17: note = Any amino acid
  VARIANT 18: note = Any amino acid
  VARIANT 19: note = Any amino acid
  VARIANT 20: note = Any amino acid
  VARIANT 21: note = Any amino acid
  VARIANT 22: note = Any amino acid
  VARIANT 23: note = Any amino acid
  VARIANT 24: note = Any amino acid
  VARIANT 25: note = Any amino acid
  VARIANT 26: note = Any amino acid
  VARIANT 27: note = Any amino acid
  VARIANT 28: note = Any amino acid
  VARIANT 29: note = Any amino acid
  VARIANT 30: note = Any amino acid
  VARIANT 31: note = Any amino acid
  VARIANT 32: note = Any amino acid
  VARIANT 33: note = Any amino acid
  VARIANT 34: note = Any amino acid
  VARIANT 35: note = Any amino acid
  VARIANT 36: note = Any amino acid
  VARIANT 37: note = Any amino acid
  VARIANT 38: note = Any amino acid
  VARIANT 39: note = Any amino acid
  VARIANT 40: note = Any amino acid
  VARIANT 41: note = Any amino acid
  VARIANT 42: note = Any amino acid
  VARIANT 43: note = Any amino acid
  VARIANT 44: note = Any amino acid
  VARIANT 45: note = Any amino acid
  VARIANT 46: note = Any amino acid
  VARIANT 47: note = Any amino acid
  VARIANT 48: note = Any amino acid
  VARIANT 49: note = Any amino acid
  VARIANT 51: note = Any amino acid
  VARIANT 52: note = Any amino acid
  VARIANT 53: note = Any amino acid
  VARIANT 54: note = Any amino acid
  VARIANT 55: note = Any amino acid
  VARIANT 56: note = Any amino acid
  VARIANT 57: note = Any amino acid
  VARIANT 58: note = Any amino acid
  VARIANT 59: note = Any amino acid
  VARIANT 60: note = Any amino acid
  VARIANT 61: note = Any amino acid
  VARIANT 62: note = Any amino acid
  VARIANT 63: note = Any amino acid
  VARIANT 64: note = Any amino acid
  VARIANT 65: note = Any amino acid
  VARIANT 66: note = Any amino acid
  VARIANT 67: note = Any amino acid
  VARIANT 68: note = Any amino acid
  VARIANT 69: note = Any amino acid
  VARIANT 70: note = Any amino acid
  VARIANT 71: note = Any amino acid
  VARIANT 72: note = Any amino acid
  VARIANT 73: note = Any amino acid
  VARIANT 74: note = Any amino acid
  VARIANT 75: note = Any amino acid
  VARIANT 76: note = Any amino acid
  VARIANT 77: note = Any amino acid
  VARIANT 78: note = Any amino acid
  VARIANT 79: note = Any amino acid
  VARIANT 80: note = Any amino acid
  VARIANT 81: note = Any amino acid
  VARIANT 82: note = Any amino acid
  VARIANT 83: note = Any amino acid
  VARIANT 84: note = Any amino acid
  VARIANT 85: note = Any amino acid
  VARIANT 86: note = Any amino acid
  VARIANT 87: note = Any amino acid
  VARIANT 88: note = Any amino acid
  VARIANT 89: note = Any amino acid
  VARIANT 91: note = Any amino acid
  VARIANT 93: note = Any amino acid
  VARIANT 94: note = Any amino acid
DXXXXXXXXXXXXXXXXXXXXXXXXXXXXXXXXXXXXXXXXXXXXXXXXGXXXXXXXXXXXXXXXXXXXXXXXXXXXXXXXXXXXXXXXKXDXXD

SEQ ID NO: 795682 - protein, 96 aa, unidentified
  VARIANT 2: note = Any amino acid
  VARIANT 3: note = Any amino acid
  VARIANT 4: note = Any amino acid
  VARIANT 5: note = Any amino acid
  VARIANT 6: note = Any amino acid
  VARIANT 7: note = Any amino acid
  VARIANT 8: note = Any amino acid
  VARIANT 9: note = Any amino acid
  VARIANT 10: note = Any amino acid
  VARIANT 11: note = Any amino acid
  VARIANT 12: note = Any amino acid
  VARIANT 13: note = Any amino acid
  VARIANT 14: note = Any amino acid
  VARIANT 15: note = Any amino acid
  VARIANT 16: note = Any amino acid
  VARIANT 17: note = Any amino acid
  VARIANT 18: note = Any amino acid
  VARIANT 19: note = Any amino acid
  VARIANT 20: note = Any amino acid
  VARIANT 21: note = Any amino acid
  VARIANT 22: note = Any amino acid
  VARIANT 23: note = Any amino acid
  VARIANT 24: note = Any amino acid
  VARIANT 25: note = Any amino acid
  VARIANT 26: note = Any amino acid
  VARIANT 27: note = Any amino acid
  VARIANT 28: note = Any amino acid
  VARIANT 29: note = Any amino acid
  VARIANT 30: note = Any amino acid
  VARIANT 31: note = Any amino acid
  VARIANT 32: note = Any amino acid
  VARIANT 33: note = Any amino acid
  VARIANT 34: note = Any amino acid
  VARIANT 35: note = Any amino acid
  VARIANT 36: note = Any amino acid
  VARIANT 37: note = Any amino acid
  VARIANT 38: note = Any amino acid
  VARIANT 39: note = Any amino acid
  VARIANT 40: note = Any amino acid
  VARIANT 41: note = Any amino acid
  VARIANT 42: note = Any amino acid
  VARIANT 43: note = Any amino acid
  VARIANT 44: note = Any amino acid
  VARIANT 45: note = Any amino acid
  VARIANT 46: note = Any amino acid
  VARIANT 47: note = Any amino acid
  VARIANT 48: note = Any amino acid
  VARIANT 49: note = Any amino acid
  VARIANT 50: note = Any amino acid
  VARIANT 51: note = Any amino acid
  VARIANT 53: note = Any amino acid
  VARIANT 54: note = Any amino acid
  VARIANT 55: note = Any amino acid
  VARIANT 56: note = Any amino acid
  VARIANT 57: note = Any amino acid
  VARIANT 58: note = Any amino acid
  VARIANT 59: note = Any amino acid
  VARIANT 60: note = Any amino acid
  VARIANT 61: note = Any amino acid
  VARIANT 62: note = Any amino acid
  VARIANT 63: note = Any amino acid
  VARIANT 64: note = Any amino acid
  VARIANT 65: note = Any amino acid
  VARIANT 66: note = Any amino acid
  VARIANT 67: note = Any amino acid
  VARIANT 68: note = Any amino acid
  VARIANT 69: note = Any amino acid
  VARIANT 70: note = Any amino acid
  VARIANT 71: note = Any amino acid
  VARIANT 72: note = Any amino acid
  VARIANT 73: note = Any amino acid
  VARIANT 74: note = Any amino acid
  VARIANT 75: note = Any amino acid
  VARIANT 76: note = Any amino acid
  VARIANT 77: note = Any amino acid
  VARIANT 78: note = Any amino acid
  VARIANT 79: note = Any amino acid
  VARIANT 80: note = Any amino acid
  VARIANT 81: note = Any amino acid
  VARIANT 82: note = Any amino acid
  VARIANT 83: note = Any amino acid
  VARIANT 84: note = Any amino acid
  VARIANT 85: note = Any amino acid
  VARIANT 86: note = Any amino acid
  VARIANT 87: note = Any amino acid
  VARIANT 88: note = Any amino acid
  VARIANT 89: note = Any amino acid
  VARIANT 90: note = Any amino acid
  VARIANT 92: note = Any amino acid
  VARIANT 94: note = Any amino acid
  VARIANT 95: note = Any amino acid
DXXXXXXXXXXXXXXXXXXXXXXXXXXXXXXXXXXXXXXXXXXXXXXXXXXEXXXXXXXXXXXXXXXXXXXXXXXXXXXXXXXXXXXXXXKXDXXD

SEQ ID NO: 795683 - protein, 96 aa, unidentified
  VARIANT 2: note = Any amino acid
  VARIANT 3: note = Any amino acid
  VARIANT 4: note = Any amino acid
  VARIANT 5: note = Any amino acid
  VARIANT 6: note = Any amino acid
  VARIANT 7: note = Any amino acid
  VARIANT 8: note = Any amino acid
  VARIANT 9: note = Any amino acid
  VARIANT 10: note = Any amino acid
  VARIANT 11: note = Any amino acid
  VARIANT 12: note = Any amino acid
  VARIANT 13: note = Any amino acid
  VARIANT 14: note = Any amino acid
  VARIANT 15: note = Any amino acid
  VARIANT 16: note = Any amino acid
  VARIANT 17: note = Any amino acid
  VARIANT 18: note = Any amino acid
  VARIANT 19: note = Any amino acid
  VARIANT 20: note = Any amino acid
  VARIANT 21: note = Any amino acid
  VARIANT 22: note = Any amino acid
  VARIANT 23: note = Any amino acid
  VARIANT 24: note = Any amino acid
  VARIANT 25: note = Any amino acid
  VARIANT 26: note = Any amino acid
  VARIANT 27: note = Any amino acid
  VARIANT 28: note = Any amino acid
  VARIANT 29: note = Any amino acid
  VARIANT 30: note = Any amino acid
  VARIANT 31: note = Any amino acid
  VARIANT 32: note = Any amino acid
  VARIANT 33: note = Any amino acid
  VARIANT 34: note = Any amino acid
  VARIANT 35: note = Any amino acid
  VARIANT 36: note = Any amino acid
  VARIANT 37: note = Any amino acid
  VARIANT 38: note = Any amino acid
  VARIANT 39: note = Any amino acid
  VARIANT 40: note = Any amino acid
  VARIANT 41: note = Any amino acid
  VARIANT 42: note = Any amino acid
  VARIANT 43: note = Any amino acid
  VARIANT 44: note = Any amino acid
  VARIANT 45: note = Any amino acid
  VARIANT 46: note = Any amino acid
  VARIANT 47: note = Any amino acid
  VARIANT 48: note = Any amino acid
  VARIANT 49: note = Any amino acid
  VARIANT 50: note = Any amino acid
  VARIANT 51: note = Any amino acid
  VARIANT 52: note = Any amino acid
  VARIANT 53: note = Any amino acid
  VARIANT 55: note = Any amino acid
  VARIANT 56: note = Any amino acid
  VARIANT 57: note = Any amino acid
  VARIANT 58: note = Any amino acid
  VARIANT 59: note = Any amino acid
  VARIANT 60: note = Any amino acid
  VARIANT 61: note = Any amino acid
  VARIANT 62: note = Any amino acid
  VARIANT 63: note = Any amino acid
  VARIANT 64: note = Any amino acid
  VARIANT 65: note = Any amino acid
  VARIANT 66: note = Any amino acid
  VARIANT 67: note = Any amino acid
  VARIANT 68: note = Any amino acid
  VARIANT 69: note = Any amino acid
  VARIANT 70: note = Any amino acid
  VARIANT 71: note = Any amino acid
  VARIANT 72: note = Any amino acid
  VARIANT 73: note = Any amino acid
  VARIANT 74: note = Any amino acid
  VARIANT 75: note = Any amino acid
  VARIANT 76: note = Any amino acid
  VARIANT 77: note = Any amino acid
  VARIANT 78: note = Any amino acid
  VARIANT 79: note = Any amino acid
  VARIANT 80: note = Any amino acid
  VARIANT 81: note = Any amino acid
  VARIANT 82: note = Any amino acid
  VARIANT 83: note = Any amino acid
  VARIANT 84: note = Any amino acid
  VARIANT 85: note = Any amino acid
  VARIANT 86: note = Any amino acid
  VARIANT 87: note = Any amino acid
  VARIANT 88: note = Any amino acid
  VARIANT 89: note = Any amino acid
  VARIANT 90: note = Any amino acid
  VARIANT 92: note = Any amino acid
  VARIANT 94: note = Any amino acid
  VARIANT 95: note = Any amino acid
DXXXXXXXXXXXXXXXXXXXXXXXXXXXXXXXXXXXXXXXXXXXXXXXXXXXXEXXXXXXXXXXXXXXXXXXXXXXXXXXXXXXXXXXXXKXDXXD

SEQ ID NO: 795684 - protein, 104 aa, unidentified
  VARIANT 2: note = Any amino acid
  VARIANT 3: note = Any amino acid
  VARIANT 4: note = Any amino acid
  VARIANT 5: note = Any amino acid
  VARIANT 6: note = Any amino acid
  VARIANT 7: note = Any amino acid
  VARIANT 8: note = Any amino acid
  VARIANT 9: note = Any amino acid
  VARIANT 10: note = Any amino acid
  VARIANT 11: note = Any amino acid
  VARIANT 12: note = Any amino acid
  VARIANT 13: note = Any amino acid
  VARIANT 14: note = Any amino acid
  VARIANT 15: note = Any amino acid
  VARIANT 16: note = Any amino acid
  VARIANT 17: note = Any amino acid
  VARIANT 18: note = Any amino acid
  VARIANT 19: note = Any amino acid
  VARIANT 20: note = Any amino acid
  VARIANT 21: note = Any amino acid
  VARIANT 22: note = Any amino acid
  VARIANT 23: note = Any amino acid
  VARIANT 24: note = Any amino acid
  VARIANT 25: note = Any amino acid
  VARIANT 26: note = Any amino acid
  VARIANT 27: note = Any amino acid
  VARIANT 28: note = Any amino acid
  VARIANT 29: note = Any amino acid
  VARIANT 30: note = Any amino acid
  VARIANT 31: note = Any amino acid
  VARIANT 32: note = Any amino acid
  VARIANT 33: note = Any amino acid
  VARIANT 34: note = Any amino acid
  VARIANT 35: note = Any amino acid
  VARIANT 36: note = Any amino acid
  VARIANT 37: note = Any amino acid
  VARIANT 38: note = Any amino acid
  VARIANT 39: note = Any amino acid
  VARIANT 40: note = Any amino acid
  VARIANT 41: note = Any amino acid
  VARIANT 42: note = Any amino acid
  VARIANT 43: note = Any amino acid
  VARIANT 44: note = Any amino acid
  VARIANT 45: note = Any amino acid
  VARIANT 46: note = Any amino acid
  VARIANT 47: note = Any amino acid
  VARIANT 48: note = Any amino acid
  VARIANT 49: note = Any amino acid
  VARIANT 50: note = Any amino acid
  VARIANT 51: note = Any amino acid
  VARIANT 52: note = Any amino acid
  VARIANT 53: note = Any amino acid
  VARIANT 54: note = Any amino acid
  VARIANT 55: note = Any amino acid
  VARIANT 57: note = Any amino acid
  VARIANT 58: note = Any amino acid
  VARIANT 59: note = Any amino acid
  VARIANT 60: note = Any amino acid
  VARIANT 61: note = Any amino acid
  VARIANT 62: note = Any amino acid
  VARIANT 63: note = Any amino acid
  VARIANT 64: note = Any amino acid
  VARIANT 65: note = Any amino acid
  VARIANT 66: note = Any amino acid
  VARIANT 67: note = Any amino acid
  VARIANT 68: note = Any amino acid
  VARIANT 69: note = Any amino acid
  VARIANT 70: note = Any amino acid
  VARIANT 71: note = Any amino acid
  VARIANT 72: note = Any amino acid
  VARIANT 73: note = Any amino acid
  VARIANT 74: note = Any amino acid
  VARIANT 75: note = Any amino acid
  VARIANT 76: note = Any amino acid
  VARIANT 77: note = Any amino acid
  VARIANT 78: note = Any amino acid
  VARIANT 79: note = Any amino acid
  VARIANT 80: note = Any amino acid
  VARIANT 81: note = Any amino acid
  VARIANT 82: note = Any amino acid
  VARIANT 83: note = Any amino acid
  VARIANT 84: note = Any amino acid
  VARIANT 85: note = Any amino acid
  VARIANT 86: note = Any amino acid
  VARIANT 87: note = Any amino acid
  VARIANT 88: note = Any amino acid
  VARIANT 89: note = Any amino acid
  VARIANT 90: note = Any amino acid
  VARIANT 91: note = Any amino acid
  VARIANT 92: note = Any amino acid
  VARIANT 93: note = Any amino acid
  VARIANT 94: note = Any amino acid
  VARIANT 95: note = Any amino acid
  VARIANT 96: note = Any amino acid
  VARIANT 97: note = Any amino acid
  VARIANT 98: note = Any amino acid
  VARIANT 100: note = Any amino acid
  VARIANT 102: note = Any amino acid
  VARIANT 103: note = Any amino acid
DXXXXXXXXXXXXXXXXXXXXXXXXXXXXXXXXXXXXXXXXXXXXXXXXXXXXXXEXXXXXXXXXXXXXXXXXXXXXXXXXXXXXXXXXXXXXXXXXXKXDXXD

SEQ ID NO: 795685 - protein, 101 aa, unidentified
  VARIANT 2: note = Any amino acid
  VARIANT 3: note = Any amino acid
  VARIANT 4: note = Any amino acid
  VARIANT 5: note = Any amino acid
  VARIANT 6: note = Any amino acid
  VARIANT 7: note = Any amino acid
  VARIANT 8: note = Any amino acid
  VARIANT 9: note = Any amino acid
  VARIANT 10: note = Any amino acid
  VARIANT 11: note = Any amino acid
  VARIANT 12: note = Any amino acid
  VARIANT 13: note = Any amino acid
  VARIANT 14: note = Any amino acid
  VARIANT 15: note = Any amino acid
  VARIANT 16: note = Any amino acid
  VARIANT 17: note = Any amino acid
  VARIANT 18: note = Any amino acid
  VARIANT 19: note = Any amino acid
  VARIANT 20: note = Any amino acid
  VARIANT 21: note = Any amino acid
  VARIANT 22: note = Any amino acid
  VARIANT 23: note = Any amino acid
  VARIANT 24: note = Any amino acid
  VARIANT 25: note = Any amino acid
  VARIANT 26: note = Any amino acid
  VARIANT 27: note = Any amino acid
  VARIANT 28: note = Any amino acid
  VARIANT 29: note = Any amino acid
  VARIANT 30: note = Any amino acid
  VARIANT 31: note = Any amino acid
  VARIANT 32: note = Any amino acid
  VARIANT 33: note = Any amino acid
  VARIANT 34: note = Any amino acid
  VARIANT 35: note = Any amino acid
  VARIANT 36: note = Any amino acid
  VARIANT 37: note = Any amino acid
  VARIANT 38: note = Any amino acid
  VARIANT 39: note = Any amino acid
  VARIANT 40: note = Any amino acid
  VARIANT 41: note = Any amino acid
  VARIANT 42: note = Any amino acid
  VARIANT 43: note = Any amino acid
  VARIANT 44: note = Any amino acid
  VARIANT 45: note = Any amino acid
  VARIANT 46: note = Any amino acid
  VARIANT 47: note = Any amino acid
  VARIANT 48: note = Any amino acid
  VARIANT 49: note = Any amino acid
  VARIANT 50: note = Any amino acid
  VARIANT 51: note = Any amino acid
  VARIANT 52: note = Any amino acid
  VARIANT 53: note = Any amino acid
  VARIANT 55: note = Any amino acid
  VARIANT 56: note = Any amino acid
  VARIANT 57: note = Any amino acid
  VARIANT 58: note = Any amino acid
  VARIANT 59: note = Any amino acid
  VARIANT 60: note = Any amino acid
  VARIANT 61: note = Any amino acid
  VARIANT 62: note = Any amino acid
  VARIANT 63: note = Any amino acid
  VARIANT 64: note = Any amino acid
  VARIANT 65: note = Any amino acid
  VARIANT 66: note = Any amino acid
  VARIANT 67: note = Any amino acid
  VARIANT 68: note = Any amino acid
  VARIANT 69: note = Any amino acid
  VARIANT 70: note = Any amino acid
  VARIANT 71: note = Any amino acid
  VARIANT 72: note = Any amino acid
  VARIANT 73: note = Any amino acid
  VARIANT 74: note = Any amino acid
  VARIANT 75: note = Any amino acid
  VARIANT 76: note = Any amino acid
  VARIANT 77: note = Any amino acid
  VARIANT 78: note = Any amino acid
  VARIANT 79: note = Any amino acid
  VARIANT 80: note = Any amino acid
  VARIANT 81: note = Any amino acid
  VARIANT 82: note = Any amino acid
  VARIANT 83: note = Any amino acid
  VARIANT 84: note = Any amino acid
  VARIANT 85: note = Any amino acid
  VARIANT 86: note = Any amino acid
  VARIANT 87: note = Any amino acid
  VARIANT 88: note = Any amino acid
  VARIANT 89: note = Any amino acid
  VARIANT 90: note = Any amino acid
  VARIANT 91: note = Any amino acid
  VARIANT 92: note = Any amino acid
  VARIANT 93: note = Any amino acid
  VARIANT 94: note = Any amino acid
  VARIANT 95: note = Any amino acid
  VARIANT 97: note = Any amino acid
  VARIANT 99: note = Any amino acid
  VARIANT 100: note = Any amino acid
DXXXXXXXXXXXXXXXXXXXXXXXXXXXXXXXXXXXXXXXXXXXXXXXXXXXXEXXXXXXXXXXXXXXXXXXXXXXXXXXXXXXXXXXXXXXXXXKXDXXD

SEQ ID NO: 795686 - protein, 98 aa, unidentified
  VARIANT 2: note = Any amino acid
  VARIANT 3: note = Any amino acid
  VARIANT 4: note = Any amino acid
  VARIANT 5: note = Any amino acid
  VARIANT 6: note = Any amino acid
  VARIANT 7: note = Any amino acid
  VARIANT 8: note = Any amino acid
  VARIANT 9: note = Any amino acid
  VARIANT 10: note = Any amino acid
  VARIANT 11: note = Any amino acid
  VARIANT 12: note = Any amino acid
  VARIANT 13: note = Any amino acid
  VARIANT 14: note = Any amino acid
  VARIANT 15: note = Any amino acid
  VARIANT 16: note = Any amino acid
  VARIANT 17: note = Any amino acid
  VARIANT 18: note = Any amino acid
  VARIANT 19: note = Any amino acid
  VARIANT 20: note = Any amino acid
  VARIANT 21: note = Any amino acid
  VARIANT 22: note = Any amino acid
  VARIANT 23: note = Any amino acid
  VARIANT 24: note = Any amino acid
  VARIANT 25: note = Any amino acid
  VARIANT 26: note = Any amino acid
  VARIANT 27: note = Any amino acid
  VARIANT 28: note = Any amino acid
  VARIANT 29: note = Any amino acid
  VARIANT 30: note = Any amino acid
  VARIANT 31: note = Any amino acid
  VARIANT 32: note = Any amino acid
  VARIANT 33: note = Any amino acid
  VARIANT 34: note = Any amino acid
  VARIANT 35: note = Any amino acid
  VARIANT 36: note = Any amino acid
  VARIANT 37: note = Any amino acid
  VARIANT 38: note = Any amino acid
  VARIANT 39: note = Any amino acid
  VARIANT 40: note = Any amino acid
  VARIANT 41: note = Any amino acid
  VARIANT 42: note = Any amino acid
  VARIANT 43: note = Any amino acid
  VARIANT 44: note = Any amino acid
  VARIANT 45: note = Any amino acid
  VARIANT 46: note = Any amino acid
  VARIANT 47: note = Any amino acid
  VARIANT 48: note = Any amino acid
  VARIANT 49: note = Any amino acid
  VARIANT 50: note = Any amino acid
  VARIANT 51: note = Any amino acid
  VARIANT 52: note = Any amino acid
  VARIANT 54: note = Any amino acid
  VARIANT 55: note = Any amino acid
  VARIANT 56: note = Any amino acid
  VARIANT 57: note = Any amino acid
  VARIANT 58: note = Any amino acid
  VARIANT 59: note = Any amino acid
  VARIANT 60: note = Any amino acid
  VARIANT 61: note = Any amino acid
  VARIANT 62: note = Any amino acid
  VARIANT 63: note = Any amino acid
  VARIANT 64: note = Any amino acid
  VARIANT 65: note = Any amino acid
  VARIANT 66: note = Any amino acid
  VARIANT 67: note = Any amino acid
  VARIANT 68: note = Any amino acid
  VARIANT 69: note = Any amino acid
  VARIANT 70: note = Any amino acid
  VARIANT 71: note = Any amino acid
  VARIANT 72: note = Any amino acid
  VARIANT 73: note = Any amino acid
  VARIANT 74: note = Any amino acid
  VARIANT 75: note = Any amino acid
  VARIANT 76: note = Any amino acid
  VARIANT 77: note = Any amino acid
  VARIANT 78: note = Any amino acid
  VARIANT 79: note = Any amino acid
  VARIANT 80: note = Any amino acid
  VARIANT 81: note = Any amino acid
  VARIANT 82: note = Any amino acid
  VARIANT 83: note = Any amino acid
  VARIANT 84: note = Any amino acid
  VARIANT 85: note = Any amino acid
  VARIANT 86: note = Any amino acid
  VARIANT 87: note = Any amino acid
  VARIANT 88: note = Any amino acid
  VARIANT 89: note = Any amino acid
  VARIANT 90: note = Any amino acid
  VARIANT 91: note = Any amino acid
  VARIANT 92: note = Any amino acid
  VARIANT 94: note = Any amino acid
  VARIANT 96: note = Any amino acid
  VARIANT 97: note = Any amino acid
DXXXXXXXXXXXXXXXXXXXXXXXXXXXXXXXXXXXXXXXXXXXXXXXXXXXAXXXXXXXXXXXXXXXXXXXXXXXXXXXXXXXXXXXXXXXKXDXXD

SEQ ID NO: 795687 - protein, 97 aa, unidentified
  VARIANT 2: note = Any amino acid
  VARIANT 3: note = Any amino acid
  VARIANT 4: note = Any amino acid
  VARIANT 5: note = Any amino acid
  VARIANT 6: note = Any amino acid
  VARIANT 7: note = Any amino acid
  VARIANT 8: note = Any amino acid
  VARIANT 9: note = Any amino acid
  VARIANT 10: note = Any amino acid
  VARIANT 11: note = Any amino acid
  VARIANT 12: note = Any amino acid
  VARIANT 13: note = Any amino acid
  VARIANT 14: note = Any amino acid
  VARIANT 15: note = Any amino acid
  VARIANT 16: note = Any amino acid
  VARIANT 17: note = Any amino acid
  VARIANT 18: note = Any amino acid
  VARIANT 19: note = Any amino acid
  VARIANT 20: note = Any amino acid
  VARIANT 21: note = Any amino acid
  VARIANT 22: note = Any amino acid
  VARIANT 23: note = Any amino acid
  VARIANT 24: note = Any amino acid
  VARIANT 25: note = Any amino acid
  VARIANT 26: note = Any amino acid
  VARIANT 27: note = Any amino acid
  VARIANT 28: note = Any amino acid
  VARIANT 29: note = Any amino acid
  VARIANT 30: note = Any amino acid
  VARIANT 31: note = Any amino acid
  VARIANT 32: note = Any amino acid
  VARIANT 33: note = Any amino acid
  VARIANT 34: note = Any amino acid
  VARIANT 35: note = Any amino acid
  VARIANT 36: note = Any amino acid
  VARIANT 37: note = Any amino acid
  VARIANT 38: note = Any amino acid
  VARIANT 39: note = Any amino acid
  VARIANT 40: note = Any amino acid
  VARIANT 41: note = Any amino acid
  VARIANT 42: note = Any amino acid
  VARIANT 43: note = Any amino acid
  VARIANT 44: note = Any amino acid
  VARIANT 45: note = Any amino acid
  VARIANT 46: note = Any amino acid
  VARIANT 47: note = Any amino acid
  VARIANT 48: note = Any amino acid
  VARIANT 49: note = Any amino acid
  VARIANT 50: note = Any amino acid
  VARIANT 51: note = Any amino acid
  VARIANT 52: note = Any amino acid
  VARIANT 54: note = Any amino acid
  VARIANT 55: note = Any amino acid
  VARIANT 56: note = Any amino acid
  VARIANT 57: note = Any amino acid
  VARIANT 58: note = Any amino acid
  VARIANT 59: note = Any amino acid
  VARIANT 60: note = Any amino acid
  VARIANT 61: note = Any amino acid
  VARIANT 62: note = Any amino acid
  VARIANT 63: note = Any amino acid
  VARIANT 64: note = Any amino acid
  VARIANT 65: note = Any amino acid
  VARIANT 66: note = Any amino acid
  VARIANT 67: note = Any amino acid
  VARIANT 68: note = Any amino acid
  VARIANT 69: note = Any amino acid
  VARIANT 70: note = Any amino acid
  VARIANT 71: note = Any amino acid
  VARIANT 72: note = Any amino acid
  VARIANT 73: note = Any amino acid
  VARIANT 74: note = Any amino acid
  VARIANT 75: note = Any amino acid
  VARIANT 76: note = Any amino acid
  VARIANT 77: note = Any amino acid
  VARIANT 78: note = Any amino acid
  VARIANT 79: note = Any amino acid
  VARIANT 80: note = Any amino acid
  VARIANT 81: note = Any amino acid
  VARIANT 82: note = Any amino acid
  VARIANT 83: note = Any amino acid
  VARIANT 84: note = Any amino acid
  VARIANT 85: note = Any amino acid
  VARIANT 86: note = Any amino acid
  VARIANT 87: note = Any amino acid
  VARIANT 88: note = Any amino acid
  VARIANT 89: note = Any amino acid
  VARIANT 90: note = Any amino acid
  VARIANT 91: note = Any amino acid
  VARIANT 93: note = Any amino acid
  VARIANT 95: note = Any amino acid
  VARIANT 96: note = Any amino acid
DXXXXXXXXXXXXXXXXXXXXXXXXXXXXXXXXXXXXXXXXXXXXXXXXXXXEXXXXXXXXXXXXXXXXXXXXXXXXXXXXXXXXXXXXXXRXDXXD

SEQ ID NO: 795688 - protein, 106 aa, unidentified
  VARIANT 2: note = Any amino acid
  VARIANT 3: note = Any amino acid
  VARIANT 4: note = Any amino acid
  VARIANT 5: note = Any amino acid
  VARIANT 6: note = Any amino acid
  VARIANT 7: note = Any amino acid
  VARIANT 8: note = Any amino acid
  VARIANT 9: note = Any amino acid
  VARIANT 10: note = Any amino acid
  VARIANT 11: note = Any amino acid
  VARIANT 12: note = Any amino acid
  VARIANT 13: note = Any amino acid
  VARIANT 14: note = Any amino acid
  VARIANT 15: note = Any amino acid
  VARIANT 16: note = Any amino acid
  VARIANT 17: note = Any amino acid
  VARIANT 18: note = Any amino acid
  VARIANT 19: note = Any amino acid
  VARIANT 20: note = Any amino acid
  VARIANT 21: note = Any amino acid
  VARIANT 22: note = Any amino acid
  VARIANT 23: note = Any amino acid
  VARIANT 24: note = Any amino acid
  VARIANT 25: note = Any amino acid
  VARIANT 26: note = Any amino acid
  VARIANT 27: note = Any amino acid
  VARIANT 28: note = Any amino acid
  VARIANT 29: note = Any amino acid
  VARIANT 30: note = Any amino acid
  VARIANT 31: note = Any amino acid
  VARIANT 32: note = Any amino acid
  VARIANT 33: note = Any amino acid
  VARIANT 34: note = Any amino acid
  VARIANT 35: note = Any amino acid
  VARIANT 36: note = Any amino acid
  VARIANT 37: note = Any amino acid
  VARIANT 38: note = Any amino acid
  VARIANT 39: note = Any amino acid
  VARIANT 40: note = Any amino acid
  VARIANT 41: note = Any amino acid
  VARIANT 42: note = Any amino acid
  VARIANT 43: note = Any amino acid
  VARIANT 44: note = Any amino acid
  VARIANT 45: note = Any amino acid
  VARIANT 46: note = Any amino acid
  VARIANT 47: note = Any amino acid
  VARIANT 48: note = Any amino acid
  VARIANT 49: note = Any amino acid
  VARIANT 50: note = Any amino acid
  VARIANT 51: note = Any amino acid
  VARIANT 52: note = Any amino acid
  VARIANT 53: note = Any amino acid
  VARIANT 54: note = Any amino acid
  VARIANT 55: note = Any amino acid
  VARIANT 56: note = Any amino acid
  VARIANT 57: note = Any amino acid
  VARIANT 58: note = Any amino acid
  VARIANT 59: note = Any amino acid
  VARIANT 61: note = Any amino acid
  VARIANT 62: note = Any amino acid
  VARIANT 63: note = Any amino acid
  VARIANT 64: note = Any amino acid
  VARIANT 65: note = Any amino acid
  VARIANT 66: note = Any amino acid
  VARIANT 67: note = Any amino acid
  VARIANT 68: note = Any amino acid
  VARIANT 69: note = Any amino acid
  VARIANT 70: note = Any amino acid
  VARIANT 71: note = Any amino acid
  VARIANT 72: note = Any amino acid
  VARIANT 73: note = Any amino acid
  VARIANT 74: note = Any amino acid
  VARIANT 75: note = Any amino acid
  VARIANT 76: note = Any amino acid
  VARIANT 77: note = Any amino acid
  VARIANT 78: note = Any amino acid
  VARIANT 79: note = Any amino acid
  VARIANT 80: note = Any amino acid
  VARIANT 81: note = Any amino acid
  VARIANT 82: note = Any amino acid
  VARIANT 83: note = Any amino acid
  VARIANT 84: note = Any amino acid
  VARIANT 85: note = Any amino acid
  VARIANT 86: note = Any amino acid
  VARIANT 87: note = Any amino acid
  VARIANT 88: note = Any amino acid
  VARIANT 89: note = Any amino acid
  VARIANT 90: note = Any amino acid
  VARIANT 91: note = Any amino acid
  VARIANT 92: note = Any amino acid
  VARIANT 93: note = Any amino acid
  VARIANT 94: note = Any amino acid
  VARIANT 95: note = Any amino acid
  VARIANT 96: note = Any amino acid
  VARIANT 97: note = Any amino acid
  VARIANT 98: note = Any amino acid
  VARIANT 99: note = Any amino acid
  VARIANT 100: note = Any amino acid
  VARIANT 102: note = Any amino acid
  VARIANT 104: note = Any amino acid
  VARIANT 105: note = Any amino acid
DXXXXXXXXXXXXXXXXXXXXXXXXXXXXXXXXXXXXXXXXXXXXXXXXXXXXXXXXXXEXXXXXXXXXXXXXXXXXXXXXXXXXXXXXXXXXXXXXXXXKXDXXD

SEQ ID NO: 795689 - protein, 85 aa, unidentified
  VARIANT 2: note = Any amino acid
  VARIANT 3: note = Any amino acid
  VARIANT 4: note = Any amino acid
  VARIANT 5: note = Any amino acid
  VARIANT 6: note = Any amino acid
  VARIANT 7: note = Any amino acid
  VARIANT 8: note = Any amino acid
  VARIANT 9: note = Any amino acid
  VARIANT 10: note = Any amino acid
  VARIANT 11: note = Any amino acid
  VARIANT 12: note = Any amino acid
  VARIANT 13: note = Any amino acid
  VARIANT 14: note = Any amino acid
  VARIANT 15: note = Any amino acid
  VARIANT 16: note = Any amino acid
  VARIANT 17: note = Any amino acid
  VARIANT 18: note = Any amino acid
  VARIANT 19: note = Any amino acid
  VARIANT 20: note = Any amino acid
  VARIANT 21: note = Any amino acid
  VARIANT 22: note = Any amino acid
  VARIANT 23: note = Any amino acid
  VARIANT 24: note = Any amino acid
  VARIANT 25: note = Any amino acid
  VARIANT 26: note = Any amino acid
  VARIANT 27: note = Any amino acid
  VARIANT 28: note = Any amino acid
  VARIANT 29: note = Any amino acid
  VARIANT 30: note = Any amino acid
  VARIANT 31: note = Any amino acid
  VARIANT 32: note = Any amino acid
  VARIANT 33: note = Any amino acid
  VARIANT 34: note = Any amino acid
  VARIANT 35: note = Any amino acid
  VARIANT 36: note = Any amino acid
  VARIANT 37: note = Any amino acid
  VARIANT 38: note = Any amino acid
  VARIANT 39: note = Any amino acid
  VARIANT 41: note = Any amino acid
  VARIANT 42: note = Any amino acid
  VARIANT 43: note = Any amino acid
  VARIANT 44: note = Any amino acid
  VARIANT 45: note = Any amino acid
  VARIANT 46: note = Any amino acid
  VARIANT 47: note = Any amino acid
  VARIANT 48: note = Any amino acid
  VARIANT 49: note = Any amino acid
  VARIANT 50: note = Any amino acid
  VARIANT 51: note = Any amino acid
  VARIANT 52: note = Any amino acid
  VARIANT 53: note = Any amino acid
  VARIANT 54: note = Any amino acid
  VARIANT 55: note = Any amino acid
  VARIANT 56: note = Any amino acid
  VARIANT 57: note = Any amino acid
  VARIANT 58: note = Any amino acid
  VARIANT 59: note = Any amino acid
  VARIANT 60: note = Any amino acid
  VARIANT 61: note = Any amino acid
  VARIANT 62: note = Any amino acid
  VARIANT 63: note = Any amino acid
  VARIANT 64: note = Any amino acid
  VARIANT 65: note = Any amino acid
  VARIANT 66: note = Any amino acid
  VARIANT 67: note = Any amino acid
  VARIANT 68: note = Any amino acid
  VARIANT 69: note = Any amino acid
  VARIANT 70: note = Any amino acid
  VARIANT 71: note = Any amino acid
  VARIANT 72: note = Any amino acid
  VARIANT 73: note = Any amino acid
  VARIANT 74: note = Any amino acid
  VARIANT 75: note = Any amino acid
  VARIANT 76: note = Any amino acid
  VARIANT 77: note = Any amino acid
  VARIANT 78: note = Any amino acid
  VARIANT 79: note = Any amino acid
  VARIANT 81: note = Any amino acid
  VARIANT 83: note = Any amino acid
  VARIANT 84: note = Any amino acid
DXXXXXXXXXXXXXXXXXXXXXXXXXXXXXXXXXXXXXXEXXXXXXXXXXXXXXXXXXXXXXXXXXXXXXXXXXXXXXXKXDXXD

SEQ ID NO: 795690 - protein, 93 aa, unidentified
  VARIANT 2: note = Any amino acid
  VARIANT 3: note = Any amino acid
  VARIANT 4: note = Any amino acid
  VARIANT 5: note = Any amino acid
  VARIANT 6: note = Any amino acid
  VARIANT 7: note = Any amino acid
  VARIANT 8: note = Any amino acid
  VARIANT 9: note = Any amino acid
  VARIANT 10: note = Any amino acid
  VARIANT 11: note = Any amino acid
  VARIANT 12: note = Any amino acid
  VARIANT 13: note = Any amino acid
  VARIANT 14: note = Any amino acid
  VARIANT 15: note = Any amino acid
  VARIANT 16: note = Any amino acid
  VARIANT 17: note = Any amino acid
  VARIANT 18: note = Any amino acid
  VARIANT 19: note = Any amino acid
  VARIANT 20: note = Any amino acid
  VARIANT 21: note = Any amino acid
  VARIANT 22: note = Any amino acid
  VARIANT 23: note = Any amino acid
  VARIANT 24: note = Any amino acid
  VARIANT 25: note = Any amino acid
  VARIANT 26: note = Any amino acid
  VARIANT 27: note = Any amino acid
  VARIANT 28: note = Any amino acid
  VARIANT 29: note = Any amino acid
  VARIANT 30: note = Any amino acid
  VARIANT 31: note = Any amino acid
  VARIANT 32: note = Any amino acid
  VARIANT 33: note = Any amino acid
  VARIANT 34: note = Any amino acid
  VARIANT 35: note = Any amino acid
  VARIANT 36: note = Any amino acid
  VARIANT 37: note = Any amino acid
  VARIANT 38: note = Any amino acid
  VARIANT 39: note = Any amino acid
  VARIANT 40: note = Any amino acid
  VARIANT 41: note = Any amino acid
  VARIANT 42: note = Any amino acid
  VARIANT 43: note = Any amino acid
  VARIANT 44: note = Any amino acid
  VARIANT 45: note = Any amino acid
  VARIANT 46: note = Any amino acid
  VARIANT 47: note = Any amino acid
  VARIANT 48: note = Any amino acid
  VARIANT 49: note = Any amino acid
  VARIANT 50: note = Any amino acid
  VARIANT 51: note = Any amino acid
  VARIANT 52: note = Any amino acid
  VARIANT 53: note = Any amino acid
  VARIANT 55: note = Any amino acid
  VARIANT 56: note = Any amino acid
  VARIANT 57: note = Any amino acid
  VARIANT 58: note = Any amino acid
  VARIANT 59: note = Any amino acid
  VARIANT 60: note = Any amino acid
  VARIANT 61: note = Any amino acid
  VARIANT 62: note = Any amino acid
  VARIANT 63: note = Any amino acid
  VARIANT 64: note = Any amino acid
  VARIANT 65: note = Any amino acid
  VARIANT 66: note = Any amino acid
  VARIANT 67: note = Any amino acid
  VARIANT 68: note = Any amino acid
  VARIANT 69: note = Any amino acid
  VARIANT 70: note = Any amino acid
  VARIANT 71: note = Any amino acid
  VARIANT 72: note = Any amino acid
  VARIANT 73: note = Any amino acid
  VARIANT 74: note = Any amino acid
  VARIANT 75: note = Any amino acid
  VARIANT 76: note = Any amino acid
  VARIANT 77: note = Any amino acid
  VARIANT 78: note = Any amino acid
  VARIANT 79: note = Any amino acid
  VARIANT 80: note = Any amino acid
  VARIANT 81: note = Any amino acid
  VARIANT 82: note = Any amino acid
  VARIANT 83: note = Any amino acid
  VARIANT 84: note = Any amino acid
  VARIANT 85: note = Any amino acid
  VARIANT 86: note = Any amino acid
  VARIANT 87: note = Any amino acid
  VARIANT 89: note = Any amino acid
  VARIANT 91: note = Any amino acid
  VARIANT 92: note = Any amino acid
DXXXXXXXXXXXXXXXXXXXXXXXXXXXXXXXXXXXXXXXXXXXXXXXXXXXXEXXXXXXXXXXXXXXXXXXXXXXXXXXXXXXXXXKXDXXD

SEQ ID NO: 795691 - protein, 88 aa, unidentified
  VARIANT 2: note = Any amino acid
  VARIANT 3: note = Any amino acid
  VARIANT 4: note = Any amino acid
  VARIANT 5: note = Any amino acid
  VARIANT 6: note = Any amino acid
  VARIANT 7: note = Any amino acid
  VARIANT 8: note = Any amino acid
  VARIANT 9: note = Any amino acid
  VARIANT 10: note = Any amino acid
  VARIANT 11: note = Any amino acid
  VARIANT 12: note = Any amino acid
  VARIANT 13: note = Any amino acid
  VARIANT 14: note = Any amino acid
  VARIANT 15: note = Any amino acid
  VARIANT 16: note = Any amino acid
  VARIANT 17: note = Any amino acid
  VARIANT 18: note = Any amino acid
  VARIANT 19: note = Any amino acid
  VARIANT 20: note = Any amino acid
  VARIANT 21: note = Any amino acid
  VARIANT 22: note = Any amino acid
  VARIANT 23: note = Any amino acid
  VARIANT 24: note = Any amino acid
  VARIANT 25: note = Any amino acid
  VARIANT 26: note = Any amino acid
  VARIANT 27: note = Any amino acid
  VARIANT 28: note = Any amino acid
  VARIANT 29: note = Any amino acid
  VARIANT 30: note = Any amino acid
  VARIANT 31: note = Any amino acid
  VARIANT 32: note = Any amino acid
  VARIANT 33: note = Any amino acid
  VARIANT 34: note = Any amino acid
  VARIANT 35: note = Any amino acid
  VARIANT 36: note = Any amino acid
  VARIANT 37: note = Any amino acid
  VARIANT 38: note = Any amino acid
  VARIANT 39: note = Any amino acid
  VARIANT 40: note = Any amino acid
  VARIANT 41: note = Any amino acid
  VARIANT 42: note = Any amino acid
  VARIANT 43: note = Any amino acid
  VARIANT 44: note = Any amino acid
  VARIANT 46: note = Any amino acid
  VARIANT 47: note = Any amino acid
  VARIANT 48: note = Any amino acid
  VARIANT 49: note = Any amino acid
  VARIANT 50: note = Any amino acid
  VARIANT 51: note = Any amino acid
  VARIANT 52: note = Any amino acid
  VARIANT 53: note = Any amino acid
  VARIANT 54: note = Any amino acid
  VARIANT 55: note = Any amino acid
  VARIANT 56: note = Any amino acid
  VARIANT 57: note = Any amino acid
  VARIANT 58: note = Any amino acid
  VARIANT 59: note = Any amino acid
  VARIANT 60: note = Any amino acid
  VARIANT 61: note = Any amino acid
  VARIANT 62: note = Any amino acid
  VARIANT 63: note = Any amino acid
  VARIANT 64: note = Any amino acid
  VARIANT 65: note = Any amino acid
  VARIANT 66: note = Any amino acid
  VARIANT 67: note = Any amino acid
  VARIANT 68: note = Any amino acid
  VARIANT 69: note = Any amino acid
  VARIANT 70: note = Any amino acid
  VARIANT 71: note = Any amino acid
  VARIANT 72: note = Any amino acid
  VARIANT 73: note = Any amino acid
  VARIANT 74: note = Any amino acid
  VARIANT 75: note = Any amino acid
  VARIANT 76: note = Any amino acid
  VARIANT 77: note = Any amino acid
  VARIANT 78: note = Any amino acid
  VARIANT 79: note = Any amino acid
  VARIANT 80: note = Any amino acid
  VARIANT 81: note = Any amino acid
  VARIANT 82: note = Any amino acid
  VARIANT 84: note = Any amino acid
  VARIANT 86: note = Any amino acid
  VARIANT 87: note = Any amino acid
DXXXXXXXXXXXXXXXXXXXXXXXXXXXXXXXXXXXXXXXXXXXEXXXXXXXXXXXXXXXXXXXXXXXXXXXXXXXXXXXXXKXDXXD

SEQ ID NO: 795692 - protein, 101 aa, unidentified
  VARIANT 2: note = Any amino acid
  VARIANT 3: note = Any amino acid
  VARIANT 4: note = Any amino acid
  VARIANT 5: note = Any amino acid
  VARIANT 6: note = Any amino acid
  VARIANT 7: note = Any amino acid
  VARIANT 8: note = Any amino acid
  VARIANT 9: note = Any amino acid
  VARIANT 10: note = Any amino acid
  VARIANT 11: note = Any amino acid
  VARIANT 12: note = Any amino acid
  VARIANT 13: note = Any amino acid
  VARIANT 14: note = Any amino acid
  VARIANT 15: note = Any amino acid
  VARIANT 16: note = Any amino acid
  VARIANT 17: note = Any amino acid
  VARIANT 18: note = Any amino acid
  VARIANT 19: note = Any amino acid
  VARIANT 20: note = Any amino acid
  VARIANT 21: note = Any amino acid
  VARIANT 22: note = Any amino acid
  VARIANT 23: note = Any amino acid
  VARIANT 24: note = Any amino acid
  VARIANT 25: note = Any amino acid
  VARIANT 26: note = Any amino acid
  VARIANT 27: note = Any amino acid
  VARIANT 28: note = Any amino acid
  VARIANT 29: note = Any amino acid
  VARIANT 30: note = Any amino acid
  VARIANT 31: note = Any amino acid
  VARIANT 32: note = Any amino acid
  VARIANT 33: note = Any amino acid
  VARIANT 34: note = Any amino acid
  VARIANT 35: note = Any amino acid
  VARIANT 36: note = Any amino acid
  VARIANT 37: note = Any amino acid
  VARIANT 38: note = Any amino acid
  VARIANT 39: note = Any amino acid
  VARIANT 40: note = Any amino acid
  VARIANT 41: note = Any amino acid
  VARIANT 42: note = Any amino acid
  VARIANT 43: note = Any amino acid
  VARIANT 44: note = Any amino acid
  VARIANT 45: note = Any amino acid
  VARIANT 46: note = Any amino acid
  VARIANT 47: note = Any amino acid
  VARIANT 48: note = Any amino acid
  VARIANT 49: note = Any amino acid
  VARIANT 50: note = Any amino acid
  VARIANT 51: note = Any amino acid
  VARIANT 52: note = Any amino acid
  VARIANT 53: note = Any amino acid
  VARIANT 54: note = Any amino acid
  VARIANT 55: note = Any amino acid
  VARIANT 57: note = Any amino acid
  VARIANT 58: note = Any amino acid
  VARIANT 59: note = Any amino acid
  VARIANT 60: note = Any amino acid
  VARIANT 61: note = Any amino acid
  VARIANT 62: note = Any amino acid
  VARIANT 63: note = Any amino acid
  VARIANT 64: note = Any amino acid
  VARIANT 65: note = Any amino acid
  VARIANT 66: note = Any amino acid
  VARIANT 67: note = Any amino acid
  VARIANT 68: note = Any amino acid
  VARIANT 69: note = Any amino acid
  VARIANT 70: note = Any amino acid
  VARIANT 71: note = Any amino acid
  VARIANT 72: note = Any amino acid
  VARIANT 73: note = Any amino acid
  VARIANT 74: note = Any amino acid
  VARIANT 75: note = Any amino acid
  VARIANT 76: note = Any amino acid
  VARIANT 77: note = Any amino acid
  VARIANT 78: note = Any amino acid
  VARIANT 79: note = Any amino acid
  VARIANT 80: note = Any amino acid
  VARIANT 81: note = Any amino acid
  VARIANT 82: note = Any amino acid
  VARIANT 83: note = Any amino acid
  VARIANT 84: note = Any amino acid
  VARIANT 85: note = Any amino acid
  VARIANT 86: note = Any amino acid
  VARIANT 87: note = Any amino acid
  VARIANT 88: note = Any amino acid
  VARIANT 89: note = Any amino acid
  VARIANT 90: note = Any amino acid
  VARIANT 91: note = Any amino acid
  VARIANT 92: note = Any amino acid
  VARIANT 93: note = Any amino acid
  VARIANT 94: note = Any amino acid
  VARIANT 95: note = Any amino acid
  VARIANT 97: note = Any amino acid
  VARIANT 99: note = Any amino acid
  VARIANT 100: note = Any amino acid
DXXXXXXXXXXXXXXXXXXXXXXXXXXXXXXXXXXXXXXXXXXXXXXXXXXXXXXEXXXXXXXXXXXXXXXXXXXXXXXXXXXXXXXXXXXXXXXHXDXXD

SEQ ID NO: 795693 - protein, 94 aa, unidentified
  VARIANT 2: note = Any amino acid
  VARIANT 3: note = Any amino acid
  VARIANT 4: note = Any amino acid
  VARIANT 5: note = Any amino acid
  VARIANT 6: note = Any amino acid
  VARIANT 7: note = Any amino acid
  VARIANT 8: note = Any amino acid
  VARIANT 9: note = Any amino acid
  VARIANT 10: note = Any amino acid
  VARIANT 11: note = Any amino acid
  VARIANT 12: note = Any amino acid
  VARIANT 13: note = Any amino acid
  VARIANT 14: note = Any amino acid
  VARIANT 15: note = Any amino acid
  VARIANT 16: note = Any amino acid
  VARIANT 17: note = Any amino acid
  VARIANT 18: note = Any amino acid
  VARIANT 19: note = Any amino acid
  VARIANT 20: note = Any amino acid
  VARIANT 21: note = Any amino acid
  VARIANT 22: note = Any amino acid
  VARIANT 23: note = Any amino acid
  VARIANT 24: note = Any amino acid
  VARIANT 25: note = Any amino acid
  VARIANT 26: note = Any amino acid
  VARIANT 27: note = Any amino acid
  VARIANT 28: note = Any amino acid
  VARIANT 29: note = Any amino acid
  VARIANT 30: note = Any amino acid
  VARIANT 31: note = Any amino acid
  VARIANT 32: note = Any amino acid
  VARIANT 33: note = Any amino acid
  VARIANT 34: note = Any amino acid
  VARIANT 35: note = Any amino acid
  VARIANT 36: note = Any amino acid
  VARIANT 37: note = Any amino acid
  VARIANT 38: note = Any amino acid
  VARIANT 39: note = Any amino acid
  VARIANT 40: note = Any amino acid
  VARIANT 41: note = Any amino acid
  VARIANT 42: note = Any amino acid
  VARIANT 43: note = Any amino acid
  VARIANT 44: note = Any amino acid
  VARIANT 45: note = Any amino acid
  VARIANT 46: note = Any amino acid
  VARIANT 47: note = Any amino acid
  VARIANT 48: note = Any amino acid
  VARIANT 49: note = Any amino acid
  VARIANT 50: note = Any amino acid
  VARIANT 51: note = Any amino acid
  VARIANT 52: note = Any amino acid
  VARIANT 53: note = Any amino acid
  VARIANT 54: note = Any amino acid
  VARIANT 56: note = Any amino acid
  VARIANT 57: note = Any amino acid
  VARIANT 58: note = Any amino acid
  VARIANT 59: note = Any amino acid
  VARIANT 60: note = Any amino acid
  VARIANT 61: note = Any amino acid
  VARIANT 62: note = Any amino acid
  VARIANT 63: note = Any amino acid
  VARIANT 64: note = Any amino acid
  VARIANT 65: note = Any amino acid
  VARIANT 66: note = Any amino acid
  VARIANT 67: note = Any amino acid
  VARIANT 68: note = Any amino acid
  VARIANT 69: note = Any amino acid
  VARIANT 70: note = Any amino acid
  VARIANT 71: note = Any amino acid
  VARIANT 72: note = Any amino acid
  VARIANT 73: note = Any amino acid
  VARIANT 74: note = Any amino acid
  VARIANT 75: note = Any amino acid
  VARIANT 76: note = Any amino acid
  VARIANT 77: note = Any amino acid
  VARIANT 78: note = Any amino acid
  VARIANT 79: note = Any amino acid
  VARIANT 80: note = Any amino acid
  VARIANT 81: note = Any amino acid
  VARIANT 82: note = Any amino acid
  VARIANT 83: note = Any amino acid
  VARIANT 84: note = Any amino acid
  VARIANT 85: note = Any amino acid
  VARIANT 86: note = Any amino acid
  VARIANT 87: note = Any amino acid
  VARIANT 88: note = Any amino acid
  VARIANT 90: note = Any amino acid
  VARIANT 92: note = Any amino acid
  VARIANT 93: note = Any amino acid
DXXXXXXXXXXXXXXXXXXXXXXXXXXXXXXXXXXXXXXXXXXXXXXXXXXXXXEXXXXXXXXXXXXXXXXXXXXXXXXXXXXXXXXXKXDXXD

SEQ ID NO: 795694 - protein, 95 aa, unidentified
  VARIANT 2: note = Any amino acid
  VARIANT 3: note = Any amino acid
  VARIANT 4: note = Any amino acid
  VARIANT 5: note = Any amino acid
  VARIANT 6: note = Any amino acid
  VARIANT 7: note = Any amino acid
  VARIANT 8: note = Any amino acid
  VARIANT 9: note = Any amino acid
  VARIANT 10: note = Any amino acid
  VARIANT 11: note = Any amino acid
  VARIANT 12: note = Any amino acid
  VARIANT 13: note = Any amino acid
  VARIANT 14: note = Any amino acid
  VARIANT 15: note = Any amino acid
  VARIANT 16: note = Any amino acid
  VARIANT 17: note = Any amino acid
  VARIANT 18: note = Any amino acid
  VARIANT 19: note = Any amino acid
  VARIANT 20: note = Any amino acid
  VARIANT 21: note = Any amino acid
  VARIANT 22: note = Any amino acid
  VARIANT 23: note = Any amino acid
  VARIANT 24: note = Any amino acid
  VARIANT 25: note = Any amino acid
  VARIANT 26: note = Any amino acid
  VARIANT 27: note = Any amino acid
  VARIANT 28: note = Any amino acid
  VARIANT 29: note = Any amino acid
  VARIANT 30: note = Any amino acid
  VARIANT 31: note = Any amino acid
  VARIANT 32: note = Any amino acid
  VARIANT 33: note = Any amino acid
  VARIANT 34: note = Any amino acid
  VARIANT 35: note = Any amino acid
  VARIANT 36: note = Any amino acid
  VARIANT 37: note = Any amino acid
  VARIANT 38: note = Any amino acid
  VARIANT 39: note = Any amino acid
  VARIANT 40: note = Any amino acid
  VARIANT 41: note = Any amino acid
  VARIANT 42: note = Any amino acid
  VARIANT 43: note = Any amino acid
  VARIANT 44: note = Any amino acid
  VARIANT 45: note = Any amino acid
  VARIANT 46: note = Any amino acid
  VARIANT 47: note = Any amino acid
  VARIANT 48: note = Any amino acid
  VARIANT 50: note = Any amino acid
  VARIANT 51: note = Any amino acid
  VARIANT 52: note = Any amino acid
  VARIANT 53: note = Any amino acid
  VARIANT 54: note = Any amino acid
  VARIANT 55: note = Any amino acid
  VARIANT 56: note = Any amino acid
  VARIANT 57: note = Any amino acid
  VARIANT 58: note = Any amino acid
  VARIANT 59: note = Any amino acid
  VARIANT 60: note = Any amino acid
  VARIANT 61: note = Any amino acid
  VARIANT 62: note = Any amino acid
  VARIANT 63: note = Any amino acid
  VARIANT 64: note = Any amino acid
  VARIANT 65: note = Any amino acid
  VARIANT 66: note = Any amino acid
  VARIANT 67: note = Any amino acid
  VARIANT 68: note = Any amino acid
  VARIANT 69: note = Any amino acid
  VARIANT 70: note = Any amino acid
  VARIANT 71: note = Any amino acid
  VARIANT 72: note = Any amino acid
  VARIANT 73: note = Any amino acid
  VARIANT 74: note = Any amino acid
  VARIANT 75: note = Any amino acid
  VARIANT 76: note = Any amino acid
  VARIANT 77: note = Any amino acid
  VARIANT 78: note = Any amino acid
  VARIANT 79: note = Any amino acid
  VARIANT 80: note = Any amino acid
  VARIANT 81: note = Any amino acid
  VARIANT 82: note = Any amino acid
  VARIANT 83: note = Any amino acid
  VARIANT 84: note = Any amino acid
  VARIANT 85: note = Any amino acid
  VARIANT 86: note = Any amino acid
  VARIANT 87: note = Any amino acid
  VARIANT 88: note = Any amino acid
  VARIANT 89: note = Any amino acid
  VARIANT 91: note = Any amino acid
  VARIANT 93: note = Any amino acid
  VARIANT 94: note = Any amino acid
DXXXXXXXXXXXXXXXXXXXXXXXXXXXXXXXXXXXXXXXXXXXXXXXCXXXXXXXXXXXXXXXXXXXXXXXXXXXXXXXXXXXXXXXXKXDXXD

SEQ ID NO: 795695 - protein, 97 aa, unidentified
  VARIANT 2: note = Any amino acid
  VARIANT 3: note = Any amino acid
  VARIANT 4: note = Any amino acid
  VARIANT 5: note = Any amino acid
  VARIANT 6: note = Any amino acid
  VARIANT 7: note = Any amino acid
  VARIANT 8: note = Any amino acid
  VARIANT 9: note = Any amino acid
  VARIANT 10: note = Any amino acid
  VARIANT 11: note = Any amino acid
  VARIANT 12: note = Any amino acid
  VARIANT 13: note = Any amino acid
  VARIANT 14: note = Any amino acid
  VARIANT 15: note = Any amino acid
  VARIANT 16: note = Any amino acid
  VARIANT 17: note = Any amino acid
  VARIANT 18: note = Any amino acid
  VARIANT 19: note = Any amino acid
  VARIANT 20: note = Any amino acid
  VARIANT 21: note = Any amino acid
  VARIANT 22: note = Any amino acid
  VARIANT 23: note = Any amino acid
  VARIANT 24: note = Any amino acid
  VARIANT 25: note = Any amino acid
  VARIANT 26: note = Any amino acid
  VARIANT 27: note = Any amino acid
  VARIANT 28: note = Any amino acid
  VARIANT 29: note = Any amino acid
  VARIANT 30: note = Any amino acid
  VARIANT 31: note = Any amino acid
  VARIANT 32: note = Any amino acid
  VARIANT 33: note = Any amino acid
  VARIANT 34: note = Any amino acid
  VARIANT 35: note = Any amino acid
  VARIANT 36: note = Any amino acid
  VARIANT 37: note = Any amino acid
  VARIANT 38: note = Any amino acid
  VARIANT 39: note = Any amino acid
  VARIANT 40: note = Any amino acid
  VARIANT 41: note = Any amino acid
  VARIANT 42: note = Any amino acid
  VARIANT 43: note = Any amino acid
  VARIANT 44: note = Any amino acid
  VARIANT 45: note = Any amino acid
  VARIANT 46: note = Any amino acid
  VARIANT 47: note = Any amino acid
  VARIANT 48: note = Any amino acid
  VARIANT 49: note = Any amino acid
  VARIANT 50: note = Any amino acid
  VARIANT 52: note = Any amino acid
  VARIANT 53: note = Any amino acid
  VARIANT 54: note = Any amino acid
  VARIANT 55: note = Any amino acid
  VARIANT 56: note = Any amino acid
  VARIANT 57: note = Any amino acid
  VARIANT 58: note = Any amino acid
  VARIANT 59: note = Any amino acid
  VARIANT 60: note = Any amino acid
  VARIANT 61: note = Any amino acid
  VARIANT 62: note = Any amino acid
  VARIANT 63: note = Any amino acid
  VARIANT 64: note = Any amino acid
  VARIANT 65: note = Any amino acid
  VARIANT 66: note = Any amino acid
  VARIANT 67: note = Any amino acid
  VARIANT 68: note = Any amino acid
  VARIANT 69: note = Any amino acid
  VARIANT 70: note = Any amino acid
  VARIANT 71: note = Any amino acid
  VARIANT 72: note = Any amino acid
  VARIANT 73: note = Any amino acid
  VARIANT 74: note = Any amino acid
  VARIANT 75: note = Any amino acid
  VARIANT 76: note = Any amino acid
  VARIANT 77: note = Any amino acid
  VARIANT 78: note = Any amino acid
  VARIANT 79: note = Any amino acid
  VARIANT 80: note = Any amino acid
  VARIANT 81: note = Any amino acid
  VARIANT 82: note = Any amino acid
  VARIANT 83: note = Any amino acid
  VARIANT 84: note = Any amino acid
  VARIANT 85: note = Any amino acid
  VARIANT 86: note = Any amino acid
  VARIANT 87: note = Any amino acid
  VARIANT 88: note = Any amino acid
  VARIANT 89: note = Any amino acid
  VARIANT 90: note = Any amino acid
  VARIANT 91: note = Any amino acid
  VARIANT 93: note = Any amino acid
  VARIANT 95: note = Any amino acid
  VARIANT 96: note = Any amino acid
DXXXXXXXXXXXXXXXXXXXXXXXXXXXXXXXXXXXXXXXXXXXXXXXXXEXXXXXXXXXXXXXXXXXXXXXXXXXXXXXXXXXXXXXXXXLXDXXA

SEQ ID NO: 795696 - protein, 104 aa, unidentified
  VARIANT 2: note = Any amino acid
  VARIANT 3: note = Any amino acid
  VARIANT 4: note = Any amino acid
  VARIANT 5: note = Any amino acid
  VARIANT 6: note = Any amino acid
  VARIANT 7: note = Any amino acid
  VARIANT 8: note = Any amino acid
  VARIANT 9: note = Any amino acid
  VARIANT 10: note = Any amino acid
  VARIANT 11: note = Any amino acid
  VARIANT 12: note = Any amino acid
  VARIANT 13: note = Any amino acid
  VARIANT 14: note = Any amino acid
  VARIANT 15: note = Any amino acid
  VARIANT 16: note = Any amino acid
  VARIANT 17: note = Any amino acid
  VARIANT 18: note = Any amino acid
  VARIANT 19: note = Any amino acid
  VARIANT 20: note = Any amino acid
  VARIANT 21: note = Any amino acid
  VARIANT 22: note = Any amino acid
  VARIANT 23: note = Any amino acid
  VARIANT 24: note = Any amino acid
  VARIANT 25: note = Any amino acid
  VARIANT 26: note = Any amino acid
  VARIANT 27: note = Any amino acid
  VARIANT 28: note = Any amino acid
  VARIANT 29: note = Any amino acid
  VARIANT 30: note = Any amino acid
  VARIANT 31: note = Any amino acid
  VARIANT 32: note = Any amino acid
  VARIANT 33: note = Any amino acid
  VARIANT 34: note = Any amino acid
  VARIANT 35: note = Any amino acid
  VARIANT 36: note = Any amino acid
  VARIANT 37: note = Any amino acid
  VARIANT 38: note = Any amino acid
  VARIANT 39: note = Any amino acid
  VARIANT 40: note = Any amino acid
  VARIANT 41: note = Any amino acid
  VARIANT 42: note = Any amino acid
  VARIANT 43: note = Any amino acid
  VARIANT 44: note = Any amino acid
  VARIANT 45: note = Any amino acid
  VARIANT 46: note = Any amino acid
  VARIANT 47: note = Any amino acid
  VARIANT 48: note = Any amino acid
  VARIANT 49: note = Any amino acid
  VARIANT 50: note = Any amino acid
  VARIANT 51: note = Any amino acid
  VARIANT 52: note = Any amino acid
  VARIANT 53: note = Any amino acid
  VARIANT 54: note = Any amino acid
  VARIANT 55: note = Any amino acid
  VARIANT 56: note = Any amino acid
  VARIANT 57: note = Any amino acid
  VARIANT 58: note = Any amino acid
  VARIANT 60: note = Any amino acid
  VARIANT 61: note = Any amino acid
  VARIANT 62: note = Any amino acid
  VARIANT 63: note = Any amino acid
  VARIANT 64: note = Any amino acid
  VARIANT 65: note = Any amino acid
  VARIANT 66: note = Any amino acid
  VARIANT 67: note = Any amino acid
  VARIANT 68: note = Any amino acid
  VARIANT 69: note = Any amino acid
  VARIANT 70: note = Any amino acid
  VARIANT 71: note = Any amino acid
  VARIANT 72: note = Any amino acid
  VARIANT 73: note = Any amino acid
  VARIANT 74: note = Any amino acid
  VARIANT 75: note = Any amino acid
  VARIANT 76: note = Any amino acid
  VARIANT 77: note = Any amino acid
  VARIANT 78: note = Any amino acid
  VARIANT 79: note = Any amino acid
  VARIANT 80: note = Any amino acid
  VARIANT 81: note = Any amino acid
  VARIANT 82: note = Any amino acid
  VARIANT 83: note = Any amino acid
  VARIANT 84: note = Any amino acid
  VARIANT 85: note = Any amino acid
  VARIANT 86: note = Any amino acid
  VARIANT 87: note = Any amino acid
  VARIANT 88: note = Any amino acid
  VARIANT 89: note = Any amino acid
  VARIANT 90: note = Any amino acid
  VARIANT 91: note = Any amino acid
  VARIANT 92: note = Any amino acid
  VARIANT 93: note = Any amino acid
  VARIANT 94: note = Any amino acid
  VARIANT 95: note = Any amino acid
  VARIANT 96: note = Any amino acid
  VARIANT 97: note = Any amino acid
  VARIANT 98: note = Any amino acid
  VARIANT 100: note = Any amino acid
  VARIANT 102: note = Any amino acid
  VARIANT 103: note = Any amino acid
DXXXXXXXXXXXXXXXXXXXXXXXXXXXXXXXXXXXXXXXXXXXXXXXXXXXXXXXXXEXXXXXXXXXXXXXXXXXXXXXXXXXXXXXXXXXXXXXXXKXDXXD

SEQ ID NO: 795697 - protein, 93 aa, unidentified
  VARIANT 2: note = Any amino acid
  VARIANT 3: note = Any amino acid
  VARIANT 4: note = Any amino acid
  VARIANT 5: note = Any amino acid
  VARIANT 6: note = Any amino acid
  VARIANT 7: note = Any amino acid
  VARIANT 8: note = Any amino acid
  VARIANT 9: note = Any amino acid
  VARIANT 10: note = Any amino acid
  VARIANT 11: note = Any amino acid
  VARIANT 12: note = Any amino acid
  VARIANT 13: note = Any amino acid
  VARIANT 14: note = Any amino acid
  VARIANT 15: note = Any amino acid
  VARIANT 16: note = Any amino acid
  VARIANT 17: note = Any amino acid
  VARIANT 18: note = Any amino acid
  VARIANT 19: note = Any amino acid
  VARIANT 20: note = Any amino acid
  VARIANT 21: note = Any amino acid
  VARIANT 22: note = Any amino acid
  VARIANT 23: note = Any amino acid
  VARIANT 24: note = Any amino acid
  VARIANT 25: note = Any amino acid
  VARIANT 26: note = Any amino acid
  VARIANT 27: note = Any amino acid
  VARIANT 28: note = Any amino acid
  VARIANT 29: note = Any amino acid
  VARIANT 30: note = Any amino acid
  VARIANT 31: note = Any amino acid
  VARIANT 32: note = Any amino acid
  VARIANT 33: note = Any amino acid
  VARIANT 34: note = Any amino acid
  VARIANT 35: note = Any amino acid
  VARIANT 36: note = Any amino acid
  VARIANT 37: note = Any amino acid
  VARIANT 38: note = Any amino acid
  VARIANT 39: note = Any amino acid
  VARIANT 40: note = Any amino acid
  VARIANT 41: note = Any amino acid
  VARIANT 42: note = Any amino acid
  VARIANT 43: note = Any amino acid
  VARIANT 44: note = Any amino acid
  VARIANT 45: note = Any amino acid
  VARIANT 46: note = Any amino acid
  VARIANT 47: note = Any amino acid
  VARIANT 48: note = Any amino acid
  VARIANT 49: note = Any amino acid
  VARIANT 51: note = Any amino acid
  VARIANT 52: note = Any amino acid
  VARIANT 53: note = Any amino acid
  VARIANT 54: note = Any amino acid
  VARIANT 55: note = Any amino acid
  VARIANT 56: note = Any amino acid
  VARIANT 57: note = Any amino acid
  VARIANT 58: note = Any amino acid
  VARIANT 59: note = Any amino acid
  VARIANT 60: note = Any amino acid
  VARIANT 61: note = Any amino acid
  VARIANT 62: note = Any amino acid
  VARIANT 63: note = Any amino acid
  VARIANT 64: note = Any amino acid
  VARIANT 65: note = Any amino acid
  VARIANT 66: note = Any amino acid
  VARIANT 67: note = Any amino acid
  VARIANT 68: note = Any amino acid
  VARIANT 69: note = Any amino acid
  VARIANT 70: note = Any amino acid
  VARIANT 71: note = Any amino acid
  VARIANT 72: note = Any amino acid
  VARIANT 73: note = Any amino acid
  VARIANT 74: note = Any amino acid
  VARIANT 75: note = Any amino acid
  VARIANT 76: note = Any amino acid
  VARIANT 77: note = Any amino acid
  VARIANT 78: note = Any amino acid
  VARIANT 79: note = Any amino acid
  VARIANT 80: note = Any amino acid
  VARIANT 81: note = Any amino acid
  VARIANT 82: note = Any amino acid
  VARIANT 83: note = Any amino acid
  VARIANT 84: note = Any amino acid
  VARIANT 85: note = Any amino acid
  VARIANT 86: note = Any amino acid
  VARIANT 87: note = Any amino acid
  VARIANT 89: note = Any amino acid
  VARIANT 91: note = Any amino acid
  VARIANT 92: note = Any amino acid
DXXXXXXXXXXXXXXXXXXXXXXXXXXXXXXXXXXXXXXXXXXXXXXXXCXXXXXXXXXXXXXXXXXXXXXXXXXXXXXXXXXXXXXKXDXXD

SEQ ID NO: 795698 - protein, 95 aa, unidentified
  VARIANT 2: note = Any amino acid
  VARIANT 3: note = Any amino acid
  VARIANT 4: note = Any amino acid
  VARIANT 5: note = Any amino acid
  VARIANT 6: note = Any amino acid
  VARIANT 7: note = Any amino acid
  VARIANT 8: note = Any amino acid
  VARIANT 9: note = Any amino acid
  VARIANT 10: note = Any amino acid
  VARIANT 11: note = Any amino acid
  VARIANT 12: note = Any amino acid
  VARIANT 13: note = Any amino acid
  VARIANT 14: note = Any amino acid
  VARIANT 15: note = Any amino acid
  VARIANT 16: note = Any amino acid
  VARIANT 17: note = Any amino acid
  VARIANT 18: note = Any amino acid
  VARIANT 19: note = Any amino acid
  VARIANT 20: note = Any amino acid
  VARIANT 21: note = Any amino acid
  VARIANT 22: note = Any amino acid
  VARIANT 23: note = Any amino acid
  VARIANT 24: note = Any amino acid
  VARIANT 25: note = Any amino acid
  VARIANT 26: note = Any amino acid
  VARIANT 27: note = Any amino acid
  VARIANT 28: note = Any amino acid
  VARIANT 29: note = Any amino acid
  VARIANT 30: note = Any amino acid
  VARIANT 31: note = Any amino acid
  VARIANT 32: note = Any amino acid
  VARIANT 33: note = Any amino acid
  VARIANT 34: note = Any amino acid
  VARIANT 35: note = Any amino acid
  VARIANT 36: note = Any amino acid
  VARIANT 37: note = Any amino acid
  VARIANT 38: note = Any amino acid
  VARIANT 39: note = Any amino acid
  VARIANT 40: note = Any amino acid
  VARIANT 41: note = Any amino acid
  VARIANT 42: note = Any amino acid
  VARIANT 43: note = Any amino acid
  VARIANT 44: note = Any amino acid
  VARIANT 45: note = Any amino acid
  VARIANT 46: note = Any amino acid
  VARIANT 47: note = Any amino acid
  VARIANT 48: note = Any amino acid
  VARIANT 50: note = Any amino acid
  VARIANT 51: note = Any amino acid
  VARIANT 52: note = Any amino acid
  VARIANT 53: note = Any amino acid
  VARIANT 54: note = Any amino acid
  VARIANT 55: note = Any amino acid
  VARIANT 56: note = Any amino acid
  VARIANT 57: note = Any amino acid
  VARIANT 58: note = Any amino acid
  VARIANT 59: note = Any amino acid
  VARIANT 60: note = Any amino acid
  VARIANT 61: note = Any amino acid
  VARIANT 62: note = Any amino acid
  VARIANT 63: note = Any amino acid
  VARIANT 64: note = Any amino acid
  VARIANT 65: note = Any amino acid
  VARIANT 66: note = Any amino acid
  VARIANT 67: note = Any amino acid
  VARIANT 68: note = Any amino acid
  VARIANT 69: note = Any amino acid
  VARIANT 70: note = Any amino acid
  VARIANT 71: note = Any amino acid
  VARIANT 72: note = Any amino acid
  VARIANT 73: note = Any amino acid
  VARIANT 74: note = Any amino acid
  VARIANT 75: note = Any amino acid
  VARIANT 76: note = Any amino acid
  VARIANT 77: note = Any amino acid
  VARIANT 78: note = Any amino acid
  VARIANT 79: note = Any amino acid
  VARIANT 80: note = Any amino acid
  VARIANT 81: note = Any amino acid
  VARIANT 82: note = Any amino acid
  VARIANT 83: note = Any amino acid
  VARIANT 84: note = Any amino acid
  VARIANT 85: note = Any amino acid
  VARIANT 86: note = Any amino acid
  VARIANT 87: note = Any amino acid
  VARIANT 88: note = Any amino acid
  VARIANT 89: note = Any amino acid
  VARIANT 91: note = Any amino acid
  VARIANT 93: note = Any amino acid
  VARIANT 94: note = Any amino acid
EXXXXXXXXXXXXXXXXXXXXXXXXXXXXXXXXXXXXXXXXXXXXXXXEXXXXXXXXXXXXXXXXXXXXXXXXXXXXXXXXXXXXXXXXKXDXXD

SEQ ID NO: 795699 - protein, 98 aa, unidentified
  VARIANT 2: note = Any amino acid
  VARIANT 3: note = Any amino acid
  VARIANT 4: note = Any amino acid
  VARIANT 5: note = Any amino acid
  VARIANT 6: note = Any amino acid
  VARIANT 7: note = Any amino acid
  VARIANT 8: note = Any amino acid
  VARIANT 9: note = Any amino acid
  VARIANT 10: note = Any amino acid
  VARIANT 11: note = Any amino acid
  VARIANT 12: note = Any amino acid
  VARIANT 13: note = Any amino acid
  VARIANT 14: note = Any amino acid
  VARIANT 15: note = Any amino acid
  VARIANT 16: note = Any amino acid
  VARIANT 17: note = Any amino acid
  VARIANT 18: note = Any amino acid
  VARIANT 19: note = Any amino acid
  VARIANT 20: note = Any amino acid
  VARIANT 21: note = Any amino acid
  VARIANT 22: note = Any amino acid
  VARIANT 23: note = Any amino acid
  VARIANT 24: note = Any amino acid
  VARIANT 25: note = Any amino acid
  VARIANT 26: note = Any amino acid
  VARIANT 27: note = Any amino acid
  VARIANT 28: note = Any amino acid
  VARIANT 29: note = Any amino acid
  VARIANT 30: note = Any amino acid
  VARIANT 31: note = Any amino acid
  VARIANT 32: note = Any amino acid
  VARIANT 33: note = Any amino acid
  VARIANT 34: note = Any amino acid
  VARIANT 35: note = Any amino acid
  VARIANT 36: note = Any amino acid
  VARIANT 37: note = Any amino acid
  VARIANT 38: note = Any amino acid
  VARIANT 39: note = Any amino acid
  VARIANT 40: note = Any amino acid
  VARIANT 41: note = Any amino acid
  VARIANT 42: note = Any amino acid
  VARIANT 43: note = Any amino acid
  VARIANT 44: note = Any amino acid
  VARIANT 45: note = Any amino acid
  VARIANT 46: note = Any amino acid
  VARIANT 47: note = Any amino acid
  VARIANT 48: note = Any amino acid
  VARIANT 49: note = Any amino acid
  VARIANT 50: note = Any amino acid
  VARIANT 51: note = Any amino acid
  VARIANT 52: note = Any amino acid
  VARIANT 53: note = Any amino acid
  VARIANT 54: note = Any amino acid
  VARIANT 55: note = Any amino acid
  VARIANT 56: note = Any amino acid
  VARIANT 57: note = Any amino acid
  VARIANT 59: note = Any amino acid
  VARIANT 60: note = Any amino acid
  VARIANT 61: note = Any amino acid
  VARIANT 62: note = Any amino acid
  VARIANT 63: note = Any amino acid
  VARIANT 64: note = Any amino acid
  VARIANT 65: note = Any amino acid
  VARIANT 66: note = Any amino acid
  VARIANT 67: note = Any amino acid
  VARIANT 68: note = Any amino acid
  VARIANT 69: note = Any amino acid
  VARIANT 70: note = Any amino acid
  VARIANT 71: note = Any amino acid
  VARIANT 72: note = Any amino acid
  VARIANT 73: note = Any amino acid
  VARIANT 74: note = Any amino acid
  VARIANT 75: note = Any amino acid
  VARIANT 76: note = Any amino acid
  VARIANT 77: note = Any amino acid
  VARIANT 78: note = Any amino acid
  VARIANT 79: note = Any amino acid
  VARIANT 80: note = Any amino acid
  VARIANT 81: note = Any amino acid
  VARIANT 82: note = Any amino acid
  VARIANT 83: note = Any amino acid
  VARIANT 84: note = Any amino acid
  VARIANT 85: note = Any amino acid
  VARIANT 86: note = Any amino acid
  VARIANT 87: note = Any amino acid
  VARIANT 88: note = Any amino acid
  VARIANT 89: note = Any amino acid
  VARIANT 90: note = Any amino acid
  VARIANT 91: note = Any amino acid
  VARIANT 92: note = Any amino acid
  VARIANT 94: note = Any amino acid
  VARIANT 96: note = Any amino acid
  VARIANT 97: note = Any amino acid
DXXXXXXXXXXXXXXXXXXXXXXXXXXXXXXXXXXXXXXXXXXXXXXXXXXXXXXXXEXXXXXXXXXXXXXXXXXXXXXXXXXXXXXXXXXXKXDXXD

SEQ ID NO: 795700 - protein, 97 aa, unidentified
  VARIANT 2: note = Any amino acid
  VARIANT 3: note = Any amino acid
  VARIANT 4: note = Any amino acid
  VARIANT 5: note = Any amino acid
  VARIANT 6: note = Any amino acid
  VARIANT 7: note = Any amino acid
  VARIANT 8: note = Any amino acid
  VARIANT 9: note = Any amino acid
  VARIANT 10: note = Any amino acid
  VARIANT 11: note = Any amino acid
  VARIANT 12: note = Any amino acid
  VARIANT 13: note = Any amino acid
  VARIANT 14: note = Any amino acid
  VARIANT 15: note = Any amino acid
  VARIANT 16: note = Any amino acid
  VARIANT 17: note = Any amino acid
  VARIANT 18: note = Any amino acid
  VARIANT 19: note = Any amino acid
  VARIANT 20: note = Any amino acid
  VARIANT 21: note = Any amino acid
  VARIANT 22: note = Any amino acid
  VARIANT 23: note = Any amino acid
  VARIANT 24: note = Any amino acid
  VARIANT 25: note = Any amino acid
  VARIANT 26: note = Any amino acid
  VARIANT 27: note = Any amino acid
  VARIANT 28: note = Any amino acid
  VARIANT 29: note = Any amino acid
  VARIANT 30: note = Any amino acid
  VARIANT 31: note = Any amino acid
  VARIANT 32: note = Any amino acid
  VARIANT 33: note = Any amino acid
  VARIANT 34: note = Any amino acid
  VARIANT 35: note = Any amino acid
  VARIANT 36: note = Any amino acid
  VARIANT 37: note = Any amino acid
  VARIANT 38: note = Any amino acid
  VARIANT 39: note = Any amino acid
  VARIANT 40: note = Any amino acid
  VARIANT 41: note = Any amino acid
  VARIANT 42: note = Any amino acid
  VARIANT 43: note = Any amino acid
  VARIANT 44: note = Any amino acid
  VARIANT 45: note = Any amino acid
  VARIANT 46: note = Any amino acid
  VARIANT 47: note = Any amino acid
  VARIANT 48: note = Any amino acid
  VARIANT 49: note = Any amino acid
  VARIANT 50: note = Any amino acid
  VARIANT 52: note = Any amino acid
  VARIANT 53: note = Any amino acid
  VARIANT 54: note = Any amino acid
  VARIANT 55: note = Any amino acid
  VARIANT 56: note = Any amino acid
  VARIANT 57: note = Any amino acid
  VARIANT 58: note = Any amino acid
  VARIANT 59: note = Any amino acid
  VARIANT 60: note = Any amino acid
  VARIANT 61: note = Any amino acid
  VARIANT 62: note = Any amino acid
  VARIANT 63: note = Any amino acid
  VARIANT 64: note = Any amino acid
  VARIANT 65: note = Any amino acid
  VARIANT 66: note = Any amino acid
  VARIANT 67: note = Any amino acid
  VARIANT 68: note = Any amino acid
  VARIANT 69: note = Any amino acid
  VARIANT 70: note = Any amino acid
  VARIANT 71: note = Any amino acid
  VARIANT 72: note = Any amino acid
  VARIANT 73: note = Any amino acid
  VARIANT 74: note = Any amino acid
  VARIANT 75: note = Any amino acid
  VARIANT 76: note = Any amino acid
  VARIANT 77: note = Any amino acid
  VARIANT 78: note = Any amino acid
  VARIANT 79: note = Any amino acid
  VARIANT 80: note = Any amino acid
  VARIANT 81: note = Any amino acid
  VARIANT 82: note = Any amino acid
  VARIANT 83: note = Any amino acid
  VARIANT 84: note = Any amino acid
  VARIANT 85: note = Any amino acid
  VARIANT 86: note = Any amino acid
  VARIANT 87: note = Any amino acid
  VARIANT 88: note = Any amino acid
  VARIANT 89: note = Any amino acid
  VARIANT 90: note = Any amino acid
  VARIANT 91: note = Any amino acid
  VARIANT 93: note = Any amino acid
  VARIANT 95: note = Any amino acid
  VARIANT 96: note = Any amino acid
DXXXXXXXXXXXXXXXXXXXXXXXXXXXXXXXXXXXXXXXXXXXXXXXXXAXXXXXXXXXXXXXXXXXXXXXXXXXXXXXXXXXXXXXXXXKXDXXD

SEQ ID NO: 795701 - protein, 96 aa, unidentified
  VARIANT 2: note = Any amino acid
  VARIANT 3: note = Any amino acid
  VARIANT 4: note = Any amino acid
  VARIANT 5: note = Any amino acid
  VARIANT 6: note = Any amino acid
  VARIANT 7: note = Any amino acid
  VARIANT 8: note = Any amino acid
  VARIANT 9: note = Any amino acid
  VARIANT 10: note = Any amino acid
  VARIANT 11: note = Any amino acid
  VARIANT 12: note = Any amino acid
  VARIANT 13: note = Any amino acid
  VARIANT 14: note = Any amino acid
  VARIANT 15: note = Any amino acid
  VARIANT 16: note = Any amino acid
  VARIANT 17: note = Any amino acid
  VARIANT 18: note = Any amino acid
  VARIANT 19: note = Any amino acid
  VARIANT 20: note = Any amino acid
  VARIANT 21: note = Any amino acid
  VARIANT 22: note = Any amino acid
  VARIANT 23: note = Any amino acid
  VARIANT 24: note = Any amino acid
  VARIANT 25: note = Any amino acid
  VARIANT 26: note = Any amino acid
  VARIANT 27: note = Any amino acid
  VARIANT 28: note = Any amino acid
  VARIANT 29: note = Any amino acid
  VARIANT 30: note = Any amino acid
  VARIANT 31: note = Any amino acid
  VARIANT 32: note = Any amino acid
  VARIANT 33: note = Any amino acid
  VARIANT 34: note = Any amino acid
  VARIANT 35: note = Any amino acid
  VARIANT 36: note = Any amino acid
  VARIANT 37: note = Any amino acid
  VARIANT 38: note = Any amino acid
  VARIANT 39: note = Any amino acid
  VARIANT 40: note = Any amino acid
  VARIANT 41: note = Any amino acid
  VARIANT 42: note = Any amino acid
  VARIANT 43: note = Any amino acid
  VARIANT 44: note = Any amino acid
  VARIANT 45: note = Any amino acid
  VARIANT 46: note = Any amino acid
  VARIANT 47: note = Any amino acid
  VARIANT 48: note = Any amino acid
  VARIANT 49: note = Any amino acid
  VARIANT 50: note = Any amino acid
  VARIANT 51: note = Any amino acid
  VARIANT 52: note = Any amino acid
  VARIANT 53: note = Any amino acid
  VARIANT 54: note = Any amino acid
  VARIANT 56: note = Any amino acid
  VARIANT 57: note = Any amino acid
  VARIANT 58: note = Any amino acid
  VARIANT 59: note = Any amino acid
  VARIANT 60: note = Any amino acid
  VARIANT 61: note = Any amino acid
  VARIANT 62: note = Any amino acid
  VARIANT 63: note = Any amino acid
  VARIANT 64: note = Any amino acid
  VARIANT 65: note = Any amino acid
  VARIANT 66: note = Any amino acid
  VARIANT 67: note = Any amino acid
  VARIANT 68: note = Any amino acid
  VARIANT 69: note = Any amino acid
  VARIANT 70: note = Any amino acid
  VARIANT 71: note = Any amino acid
  VARIANT 72: note = Any amino acid
  VARIANT 73: note = Any amino acid
  VARIANT 74: note = Any amino acid
  VARIANT 75: note = Any amino acid
  VARIANT 76: note = Any amino acid
  VARIANT 77: note = Any amino acid
  VARIANT 78: note = Any amino acid
  VARIANT 79: note = Any amino acid
  VARIANT 80: note = Any amino acid
  VARIANT 81: note = Any amino acid
  VARIANT 82: note = Any amino acid
  VARIANT 83: note = Any amino acid
  VARIANT 84: note = Any amino acid
  VARIANT 85: note = Any amino acid
  VARIANT 86: note = Any amino acid
  VARIANT 87: note = Any amino acid
  VARIANT 88: note = Any amino acid
  VARIANT 89: note = Any amino acid
  VARIANT 90: note = Any amino acid
  VARIANT 92: note = Any amino acid
  VARIANT 94: note = Any amino acid
  VARIANT 95: note = Any amino acid
DXXXXXXXXXXXXXXXXXXXXXXXXXXXXXXXXXXXXXXXXXXXXXXXXXXXXXEXXXXXXXXXXXXXXXXXXXXXXXXXXXXXXXXXXXKXDXXD

SEQ ID NO: 795702 - protein, 95 aa, unidentified
  VARIANT 2: note = Any amino acid
  VARIANT 3: note = Any amino acid
  VARIANT 4: note = Any amino acid
  VARIANT 5: note = Any amino acid
  VARIANT 6: note = Any amino acid
  VARIANT 7: note = Any amino acid
  VARIANT 8: note = Any amino acid
  VARIANT 9: note = Any amino acid
  VARIANT 10: note = Any amino acid
  VARIANT 11: note = Any amino acid
  VARIANT 12: note = Any amino acid
  VARIANT 13: note = Any amino acid
  VARIANT 14: note = Any amino acid
  VARIANT 15: note = Any amino acid
  VARIANT 16: note = Any amino acid
  VARIANT 17: note = Any amino acid
  VARIANT 18: note = Any amino acid
  VARIANT 19: note = Any amino acid
  VARIANT 20: note = Any amino acid
  VARIANT 21: note = Any amino acid
  VARIANT 22: note = Any amino acid
  VARIANT 23: note = Any amino acid
  VARIANT 24: note = Any amino acid
  VARIANT 25: note = Any amino acid
  VARIANT 26: note = Any amino acid
  VARIANT 27: note = Any amino acid
  VARIANT 28: note = Any amino acid
  VARIANT 29: note = Any amino acid
  VARIANT 30: note = Any amino acid
  VARIANT 31: note = Any amino acid
  VARIANT 32: note = Any amino acid
  VARIANT 33: note = Any amino acid
  VARIANT 34: note = Any amino acid
  VARIANT 35: note = Any amino acid
  VARIANT 36: note = Any amino acid
  VARIANT 37: note = Any amino acid
  VARIANT 38: note = Any amino acid
  VARIANT 39: note = Any amino acid
  VARIANT 40: note = Any amino acid
  VARIANT 41: note = Any amino acid
  VARIANT 42: note = Any amino acid
  VARIANT 43: note = Any amino acid
  VARIANT 44: note = Any amino acid
  VARIANT 45: note = Any amino acid
  VARIANT 46: note = Any amino acid
  VARIANT 47: note = Any amino acid
  VARIANT 48: note = Any amino acid
  VARIANT 49: note = Any amino acid
  VARIANT 50: note = Any amino acid
  VARIANT 51: note = Any amino acid
  VARIANT 53: note = Any amino acid
  VARIANT 54: note = Any amino acid
  VARIANT 55: note = Any amino acid
  VARIANT 56: note = Any amino acid
  VARIANT 57: note = Any amino acid
  VARIANT 58: note = Any amino acid
  VARIANT 59: note = Any amino acid
  VARIANT 60: note = Any amino acid
  VARIANT 61: note = Any amino acid
  VARIANT 62: note = Any amino acid
  VARIANT 63: note = Any amino acid
  VARIANT 64: note = Any amino acid
  VARIANT 65: note = Any amino acid
  VARIANT 66: note = Any amino acid
  VARIANT 67: note = Any amino acid
  VARIANT 68: note = Any amino acid
  VARIANT 69: note = Any amino acid
  VARIANT 70: note = Any amino acid
  VARIANT 71: note = Any amino acid
  VARIANT 72: note = Any amino acid
  VARIANT 73: note = Any amino acid
  VARIANT 74: note = Any amino acid
  VARIANT 75: note = Any amino acid
  VARIANT 76: note = Any amino acid
  VARIANT 77: note = Any amino acid
  VARIANT 78: note = Any amino acid
  VARIANT 79: note = Any amino acid
  VARIANT 80: note = Any amino acid
  VARIANT 81: note = Any amino acid
  VARIANT 82: note = Any amino acid
  VARIANT 83: note = Any amino acid
  VARIANT 84: note = Any amino acid
  VARIANT 85: note = Any amino acid
  VARIANT 86: note = Any amino acid
  VARIANT 87: note = Any amino acid
  VARIANT 88: note = Any amino acid
  VARIANT 89: note = Any amino acid
  VARIANT 91: note = Any amino acid
  VARIANT 93: note = Any amino acid
  VARIANT 94: note = Any amino acid
DXXXXXXXXXXXXXXXXXXXXXXXXXXXXXXXXXXXXXXXXXXXXXXXXXXCXXXXXXXXXXXXXXXXXXXXXXXXXXXXXXXXXXXXXKXDXXD

SEQ ID NO: 795703 - protein, 108 aa, unidentified
  VARIANT 2: note = Any amino acid
  VARIANT 3: note = Any amino acid
  VARIANT 4: note = Any amino acid
  VARIANT 5: note = Any amino acid
  VARIANT 6: note = Any amino acid
  VARIANT 7: note = Any amino acid
  VARIANT 8: note = Any amino acid
  VARIANT 9: note = Any amino acid
  VARIANT 10: note = Any amino acid
  VARIANT 11: note = Any amino acid
  VARIANT 12: note = Any amino acid
  VARIANT 13: note = Any amino acid
  VARIANT 14: note = Any amino acid
  VARIANT 15: note = Any amino acid
  VARIANT 16: note = Any amino acid
  VARIANT 17: note = Any amino acid
  VARIANT 18: note = Any amino acid
  VARIANT 19: note = Any amino acid
  VARIANT 20: note = Any amino acid
  VARIANT 21: note = Any amino acid
  VARIANT 22: note = Any amino acid
  VARIANT 23: note = Any amino acid
  VARIANT 24: note = Any amino acid
  VARIANT 25: note = Any amino acid
  VARIANT 26: note = Any amino acid
  VARIANT 27: note = Any amino acid
  VARIANT 28: note = Any amino acid
  VARIANT 29: note = Any amino acid
  VARIANT 30: note = Any amino acid
  VARIANT 31: note = Any amino acid
  VARIANT 32: note = Any amino acid
  VARIANT 33: note = Any amino acid
  VARIANT 34: note = Any amino acid
  VARIANT 35: note = Any amino acid
  VARIANT 36: note = Any amino acid
  VARIANT 37: note = Any amino acid
  VARIANT 38: note = Any amino acid
  VARIANT 39: note = Any amino acid
  VARIANT 40: note = Any amino acid
  VARIANT 41: note = Any amino acid
  VARIANT 42: note = Any amino acid
  VARIANT 43: note = Any amino acid
  VARIANT 44: note = Any amino acid
  VARIANT 45: note = Any amino acid
  VARIANT 46: note = Any amino acid
  VARIANT 47: note = Any amino acid
  VARIANT 48: note = Any amino acid
  VARIANT 49: note = Any amino acid
  VARIANT 50: note = Any amino acid
  VARIANT 51: note = Any amino acid
  VARIANT 52: note = Any amino acid
  VARIANT 53: note = Any amino acid
  VARIANT 54: note = Any amino acid
  VARIANT 55: note = Any amino acid
  VARIANT 56: note = Any amino acid
  VARIANT 58: note = Any amino acid
  VARIANT 59: note = Any amino acid
  VARIANT 60: note = Any amino acid
  VARIANT 61: note = Any amino acid
  VARIANT 62: note = Any amino acid
  VARIANT 63: note = Any amino acid
  VARIANT 64: note = Any amino acid
  VARIANT 65: note = Any amino acid
  VARIANT 66: note = Any amino acid
  VARIANT 67: note = Any amino acid
  VARIANT 68: note = Any amino acid
  VARIANT 69: note = Any amino acid
  VARIANT 70: note = Any amino acid
  VARIANT 71: note = Any amino acid
  VARIANT 72: note = Any amino acid
  VARIANT 73: note = Any amino acid
  VARIANT 74: note = Any amino acid
  VARIANT 75: note = Any amino acid
  VARIANT 76: note = Any amino acid
  VARIANT 77: note = Any amino acid
  VARIANT 78: note = Any amino acid
  VARIANT 79: note = Any amino acid
  VARIANT 80: note = Any amino acid
  VARIANT 81: note = Any amino acid
  VARIANT 82: note = Any amino acid
  VARIANT 83: note = Any amino acid
  VARIANT 84: note = Any amino acid
  VARIANT 85: note = Any amino acid
  VARIANT 86: note = Any amino acid
  VARIANT 87: note = Any amino acid
  VARIANT 88: note = Any amino acid
  VARIANT 89: note = Any amino acid
  VARIANT 90: note = Any amino acid
  VARIANT 91: note = Any amino acid
  VARIANT 92: note = Any amino acid
  VARIANT 93: note = Any amino acid
  VARIANT 94: note = Any amino acid
  VARIANT 95: note = Any amino acid
  VARIANT 96: note = Any amino acid
  VARIANT 97: note = Any amino acid
  VARIANT 98: note = Any amino acid
  VARIANT 99: note = Any amino acid
  VARIANT 100: note = Any amino acid
  VARIANT 101: note = Any amino acid
  VARIANT 102: note = Any amino acid
  VARIANT 104: note = Any amino acid
  VARIANT 106: note = Any amino acid
  VARIANT 107: note = Any amino acid
DXXXXXXXXXXXXXXXXXXXXXXXXXXXXXXXXXXXXXXXXXXXXXXXXXXXXXXXEXXXXXXXXXXXXXXXXXXXXXXXXXXXXXXXXXXXXXXXXXXXXXKXDXXD

SEQ ID NO: 795704 - protein, 105 aa, unidentified
  VARIANT 2: note = Any amino acid
  VARIANT 3: note = Any amino acid
  VARIANT 4: note = Any amino acid
  VARIANT 5: note = Any amino acid
  VARIANT 6: note = Any amino acid
  VARIANT 7: note = Any amino acid
  VARIANT 8: note = Any amino acid
  VARIANT 9: note = Any amino acid
  VARIANT 10: note = Any amino acid
  VARIANT 11: note = Any amino acid
  VARIANT 12: note = Any amino acid
  VARIANT 13: note = Any amino acid
  VARIANT 14: note = Any amino acid
  VARIANT 15: note = Any amino acid
  VARIANT 16: note = Any amino acid
  VARIANT 17: note = Any amino acid
  VARIANT 18: note = Any amino acid
  VARIANT 19: note = Any amino acid
  VARIANT 20: note = Any amino acid
  VARIANT 21: note = Any amino acid
  VARIANT 22: note = Any amino acid
  VARIANT 23: note = Any amino acid
  VARIANT 24: note = Any amino acid
  VARIANT 25: note = Any amino acid
  VARIANT 26: note = Any amino acid
  VARIANT 27: note = Any amino acid
  VARIANT 28: note = Any amino acid
  VARIANT 29: note = Any amino acid
  VARIANT 30: note = Any amino acid
  VARIANT 31: note = Any amino acid
  VARIANT 32: note = Any amino acid
  VARIANT 33: note = Any amino acid
  VARIANT 34: note = Any amino acid
  VARIANT 35: note = Any amino acid
  VARIANT 36: note = Any amino acid
  VARIANT 37: note = Any amino acid
  VARIANT 38: note = Any amino acid
  VARIANT 39: note = Any amino acid
  VARIANT 40: note = Any amino acid
  VARIANT 41: note = Any amino acid
  VARIANT 42: note = Any amino acid
  VARIANT 43: note = Any amino acid
  VARIANT 44: note = Any amino acid
  VARIANT 45: note = Any amino acid
  VARIANT 46: note = Any amino acid
  VARIANT 47: note = Any amino acid
  VARIANT 48: note = Any amino acid
  VARIANT 49: note = Any amino acid
  VARIANT 50: note = Any amino acid
  VARIANT 51: note = Any amino acid
  VARIANT 52: note = Any amino acid
  VARIANT 53: note = Any amino acid
  VARIANT 54: note = Any amino acid
  VARIANT 55: note = Any amino acid
  VARIANT 57: note = Any amino acid
  VARIANT 58: note = Any amino acid
  VARIANT 59: note = Any amino acid
  VARIANT 60: note = Any amino acid
  VARIANT 61: note = Any amino acid
  VARIANT 62: note = Any amino acid
  VARIANT 63: note = Any amino acid
  VARIANT 64: note = Any amino acid
  VARIANT 65: note = Any amino acid
  VARIANT 66: note = Any amino acid
  VARIANT 67: note = Any amino acid
  VARIANT 68: note = Any amino acid
  VARIANT 69: note = Any amino acid
  VARIANT 70: note = Any amino acid
  VARIANT 71: note = Any amino acid
  VARIANT 72: note = Any amino acid
  VARIANT 73: note = Any amino acid
  VARIANT 74: note = Any amino acid
  VARIANT 75: note = Any amino acid
  VARIANT 76: note = Any amino acid
  VARIANT 77: note = Any amino acid
  VARIANT 78: note = Any amino acid
  VARIANT 79: note = Any amino acid
  VARIANT 80: note = Any amino acid
  VARIANT 81: note = Any amino acid
  VARIANT 82: note = Any amino acid
  VARIANT 83: note = Any amino acid
  VARIANT 84: note = Any amino acid
  VARIANT 85: note = Any amino acid
  VARIANT 86: note = Any amino acid
  VARIANT 87: note = Any amino acid
  VARIANT 88: note = Any amino acid
  VARIANT 89: note = Any amino acid
  VARIANT 90: note = Any amino acid
  VARIANT 91: note = Any amino acid
  VARIANT 92: note = Any amino acid
  VARIANT 93: note = Any amino acid
  VARIANT 94: note = Any amino acid
  VARIANT 95: note = Any amino acid
  VARIANT 96: note = Any amino acid
  VARIANT 97: note = Any amino acid
  VARIANT 98: note = Any amino acid
  VARIANT 99: note = Any amino acid
  VARIANT 101: note = Any amino acid
  VARIANT 103: note = Any amino acid
  VARIANT 104: note = Any amino acid
DXXXXXXXXXXXXXXXXXXXXXXXXXXXXXXXXXXXXXXXXXXXXXXXXXXXXXXEXXXXXXXXXXXXXXXXXXXXXXXXXXXXXXXXXXXXXXXXXXXTXDXXS

SEQ ID NO: 795705 - protein, 104 aa, unidentified
  VARIANT 2: note = Any amino acid
  VARIANT 3: note = Any amino acid
  VARIANT 4: note = Any amino acid
  VARIANT 5: note = Any amino acid
  VARIANT 6: note = Any amino acid
  VARIANT 7: note = Any amino acid
  VARIANT 8: note = Any amino acid
  VARIANT 9: note = Any amino acid
  VARIANT 10: note = Any amino acid
  VARIANT 11: note = Any amino acid
  VARIANT 12: note = Any amino acid
  VARIANT 13: note = Any amino acid
  VARIANT 14: note = Any amino acid
  VARIANT 15: note = Any amino acid
  VARIANT 16: note = Any amino acid
  VARIANT 17: note = Any amino acid
  VARIANT 18: note = Any amino acid
  VARIANT 19: note = Any amino acid
  VARIANT 20: note = Any amino acid
  VARIANT 21: note = Any amino acid
  VARIANT 22: note = Any amino acid
  VARIANT 23: note = Any amino acid
  VARIANT 24: note = Any amino acid
  VARIANT 25: note = Any amino acid
  VARIANT 26: note = Any amino acid
  VARIANT 27: note = Any amino acid
  VARIANT 28: note = Any amino acid
  VARIANT 29: note = Any amino acid
  VARIANT 30: note = Any amino acid
  VARIANT 31: note = Any amino acid
  VARIANT 32: note = Any amino acid
  VARIANT 33: note = Any amino acid
  VARIANT 34: note = Any amino acid
  VARIANT 35: note = Any amino acid
  VARIANT 36: note = Any amino acid
  VARIANT 37: note = Any amino acid
  VARIANT 38: note = Any amino acid
  VARIANT 39: note = Any amino acid
  VARIANT 40: note = Any amino acid
  VARIANT 41: note = Any amino acid
  VARIANT 42: note = Any amino acid
  VARIANT 43: note = Any amino acid
  VARIANT 44: note = Any amino acid
  VARIANT 45: note = Any amino acid
  VARIANT 46: note = Any amino acid
  VARIANT 47: note = Any amino acid
  VARIANT 48: note = Any amino acid
  VARIANT 49: note = Any amino acid
  VARIANT 50: note = Any amino acid
  VARIANT 51: note = Any amino acid
  VARIANT 52: note = Any amino acid
  VARIANT 53: note = Any amino acid
  VARIANT 54: note = Any amino acid
  VARIANT 55: note = Any amino acid
  VARIANT 56: note = Any amino acid
  VARIANT 57: note = Any amino acid
  VARIANT 59: note = Any amino acid
  VARIANT 60: note = Any amino acid
  VARIANT 61: note = Any amino acid
  VARIANT 62: note = Any amino acid
  VARIANT 63: note = Any amino acid
  VARIANT 64: note = Any amino acid
  VARIANT 65: note = Any amino acid
  VARIANT 66: note = Any amino acid
  VARIANT 67: note = Any amino acid
  VARIANT 68: note = Any amino acid
  VARIANT 69: note = Any amino acid
  VARIANT 70: note = Any amino acid
  VARIANT 71: note = Any amino acid
  VARIANT 72: note = Any amino acid
  VARIANT 73: note = Any amino acid
  VARIANT 74: note = Any amino acid
  VARIANT 75: note = Any amino acid
  VARIANT 76: note = Any amino acid
  VARIANT 77: note = Any amino acid
  VARIANT 78: note = Any amino acid
  VARIANT 79: note = Any amino acid
  VARIANT 80: note = Any amino acid
  VARIANT 81: note = Any amino acid
  VARIANT 82: note = Any amino acid
  VARIANT 83: note = Any amino acid
  VARIANT 84: note = Any amino acid
  VARIANT 85: note = Any amino acid
  VARIANT 86: note = Any amino acid
  VARIANT 87: note = Any amino acid
  VARIANT 88: note = Any amino acid
  VARIANT 89: note = Any amino acid
  VARIANT 90: note = Any amino acid
  VARIANT 91: note = Any amino acid
  VARIANT 92: note = Any amino acid
  VARIANT 93: note = Any amino acid
  VARIANT 94: note = Any amino acid
  VARIANT 95: note = Any amino acid
  VARIANT 96: note = Any amino acid
  VARIANT 97: note = Any amino acid
  VARIANT 98: note = Any amino acid
  VARIANT 100: note = Any amino acid
  VARIANT 102: note = Any amino acid
  VARIANT 103: note = Any amino acid
DXXXXXXXXXXXXXXXXXXXXXXXXXXXXXXXXXXXXXXXXXXXXXXXXXXXXXXXXEXXXXXXXXXXXXXXXXXXXXXXXXXXXXXXXXXXXXXXXXKXDXXD

SEQ ID NO: 795706 - protein, 99 aa, unidentified
  VARIANT 2: note = Any amino acid
  VARIANT 3: note = Any amino acid
  VARIANT 4: note = Any amino acid
  VARIANT 5: note = Any amino acid
  VARIANT 6: note = Any amino acid
  VARIANT 7: note = Any amino acid
  VARIANT 8: note = Any amino acid
  VARIANT 9: note = Any amino acid
  VARIANT 10: note = Any amino acid
  VARIANT 11: note = Any amino acid
  VARIANT 12: note = Any amino acid
  VARIANT 13: note = Any amino acid
  VARIANT 14: note = Any amino acid
  VARIANT 15: note = Any amino acid
  VARIANT 16: note = Any amino acid
  VARIANT 17: note = Any amino acid
  VARIANT 18: note = Any amino acid
  VARIANT 19: note = Any amino acid
  VARIANT 20: note = Any amino acid
  VARIANT 21: note = Any amino acid
  VARIANT 22: note = Any amino acid
  VARIANT 23: note = Any amino acid
  VARIANT 24: note = Any amino acid
  VARIANT 25: note = Any amino acid
  VARIANT 26: note = Any amino acid
  VARIANT 27: note = Any amino acid
  VARIANT 28: note = Any amino acid
  VARIANT 29: note = Any amino acid
  VARIANT 30: note = Any amino acid
  VARIANT 31: note = Any amino acid
  VARIANT 32: note = Any amino acid
  VARIANT 33: note = Any amino acid
  VARIANT 34: note = Any amino acid
  VARIANT 35: note = Any amino acid
  VARIANT 36: note = Any amino acid
  VARIANT 37: note = Any amino acid
  VARIANT 38: note = Any amino acid
  VARIANT 39: note = Any amino acid
  VARIANT 40: note = Any amino acid
  VARIANT 41: note = Any amino acid
  VARIANT 42: note = Any amino acid
  VARIANT 43: note = Any amino acid
  VARIANT 44: note = Any amino acid
  VARIANT 45: note = Any amino acid
  VARIANT 46: note = Any amino acid
  VARIANT 47: note = Any amino acid
  VARIANT 48: note = Any amino acid
  VARIANT 49: note = Any amino acid
  VARIANT 50: note = Any amino acid
  VARIANT 51: note = Any amino acid
  VARIANT 52: note = Any amino acid
  VARIANT 53: note = Any amino acid
  VARIANT 55: note = Any amino acid
  VARIANT 56: note = Any amino acid
  VARIANT 57: note = Any amino acid
  VARIANT 58: note = Any amino acid
  VARIANT 59: note = Any amino acid
  VARIANT 60: note = Any amino acid
  VARIANT 61: note = Any amino acid
  VARIANT 62: note = Any amino acid
  VARIANT 63: note = Any amino acid
  VARIANT 64: note = Any amino acid
  VARIANT 65: note = Any amino acid
  VARIANT 66: note = Any amino acid
  VARIANT 67: note = Any amino acid
  VARIANT 68: note = Any amino acid
  VARIANT 69: note = Any amino acid
  VARIANT 70: note = Any amino acid
  VARIANT 71: note = Any amino acid
  VARIANT 72: note = Any amino acid
  VARIANT 73: note = Any amino acid
  VARIANT 74: note = Any amino acid
  VARIANT 75: note = Any amino acid
  VARIANT 76: note = Any amino acid
  VARIANT 77: note = Any amino acid
  VARIANT 78: note = Any amino acid
  VARIANT 79: note = Any amino acid
  VARIANT 80: note = Any amino acid
  VARIANT 81: note = Any amino acid
  VARIANT 82: note = Any amino acid
  VARIANT 83: note = Any amino acid
  VARIANT 84: note = Any amino acid
  VARIANT 85: note = Any amino acid
  VARIANT 86: note = Any amino acid
  VARIANT 87: note = Any amino acid
  VARIANT 88: note = Any amino acid
  VARIANT 89: note = Any amino acid
  VARIANT 90: note = Any amino acid
  VARIANT 91: note = Any amino acid
  VARIANT 92: note = Any amino acid
  VARIANT 93: note = Any amino acid
  VARIANT 95: note = Any amino acid
  VARIANT 97: note = Any amino acid
  VARIANT 98: note = Any amino acid
DXXXXXXXXXXXXXXXXXXXXXXXXXXXXXXXXXXXXXXXXXXXXXXXXXXXXEXXXXXXXXXXXXXXXXXXXXXXXXXXXXXXXXXXXXXXXRXDXXD

SEQ ID NO: 795707 - protein, 105 aa, unidentified
  VARIANT 2: note = Any amino acid
  VARIANT 3: note = Any amino acid
  VARIANT 4: note = Any amino acid
  VARIANT 5: note = Any amino acid
  VARIANT 6: note = Any amino acid
  VARIANT 7: note = Any amino acid
  VARIANT 8: note = Any amino acid
  VARIANT 9: note = Any amino acid
  VARIANT 10: note = Any amino acid
  VARIANT 11: note = Any amino acid
  VARIANT 12: note = Any amino acid
  VARIANT 13: note = Any amino acid
  VARIANT 14: note = Any amino acid
  VARIANT 15: note = Any amino acid
  VARIANT 16: note = Any amino acid
  VARIANT 17: note = Any amino acid
  VARIANT 18: note = Any amino acid
  VARIANT 19: note = Any amino acid
  VARIANT 20: note = Any amino acid
  VARIANT 21: note = Any amino acid
  VARIANT 22: note = Any amino acid
  VARIANT 23: note = Any amino acid
  VARIANT 24: note = Any amino acid
  VARIANT 25: note = Any amino acid
  VARIANT 26: note = Any amino acid
  VARIANT 27: note = Any amino acid
  VARIANT 28: note = Any amino acid
  VARIANT 29: note = Any amino acid
  VARIANT 30: note = Any amino acid
  VARIANT 31: note = Any amino acid
  VARIANT 32: note = Any amino acid
  VARIANT 33: note = Any amino acid
  VARIANT 34: note = Any amino acid
  VARIANT 35: note = Any amino acid
  VARIANT 36: note = Any amino acid
  VARIANT 37: note = Any amino acid
  VARIANT 38: note = Any amino acid
  VARIANT 39: note = Any amino acid
  VARIANT 40: note = Any amino acid
  VARIANT 41: note = Any amino acid
  VARIANT 42: note = Any amino acid
  VARIANT 43: note = Any amino acid
  VARIANT 44: note = Any amino acid
  VARIANT 45: note = Any amino acid
  VARIANT 46: note = Any amino acid
  VARIANT 47: note = Any amino acid
  VARIANT 48: note = Any amino acid
  VARIANT 49: note = Any amino acid
  VARIANT 50: note = Any amino acid
  VARIANT 51: note = Any amino acid
  VARIANT 52: note = Any amino acid
  VARIANT 53: note = Any amino acid
  VARIANT 54: note = Any amino acid
  VARIANT 56: note = Any amino acid
  VARIANT 57: note = Any amino acid
  VARIANT 58: note = Any amino acid
  VARIANT 59: note = Any amino acid
  VARIANT 60: note = Any amino acid
  VARIANT 61: note = Any amino acid
  VARIANT 62: note = Any amino acid
  VARIANT 63: note = Any amino acid
  VARIANT 64: note = Any amino acid
  VARIANT 65: note = Any amino acid
  VARIANT 66: note = Any amino acid
  VARIANT 67: note = Any amino acid
  VARIANT 68: note = Any amino acid
  VARIANT 69: note = Any amino acid
  VARIANT 70: note = Any amino acid
  VARIANT 71: note = Any amino acid
  VARIANT 72: note = Any amino acid
  VARIANT 73: note = Any amino acid
  VARIANT 74: note = Any amino acid
  VARIANT 75: note = Any amino acid
  VARIANT 76: note = Any amino acid
  VARIANT 77: note = Any amino acid
  VARIANT 78: note = Any amino acid
  VARIANT 79: note = Any amino acid
  VARIANT 80: note = Any amino acid
  VARIANT 81: note = Any amino acid
  VARIANT 82: note = Any amino acid
  VARIANT 83: note = Any amino acid
  VARIANT 84: note = Any amino acid
  VARIANT 85: note = Any amino acid
  VARIANT 86: note = Any amino acid
  VARIANT 87: note = Any amino acid
  VARIANT 88: note = Any amino acid
  VARIANT 89: note = Any amino acid
  VARIANT 90: note = Any amino acid
  VARIANT 91: note = Any amino acid
  VARIANT 92: note = Any amino acid
  VARIANT 93: note = Any amino acid
  VARIANT 94: note = Any amino acid
  VARIANT 95: note = Any amino acid
  VARIANT 96: note = Any amino acid
  VARIANT 97: note = Any amino acid
  VARIANT 98: note = Any amino acid
  VARIANT 99: note = Any amino acid
  VARIANT 101: note = Any amino acid
  VARIANT 103: note = Any amino acid
  VARIANT 104: note = Any amino acid
DXXXXXXXXXXXXXXXXXXXXXXXXXXXXXXXXXXXXXXXXXXXXXXXXXXXXXEXXXXXXXXXXXXXXXXXXXXXXXXXXXXXXXXXXXXXXXXXXXXKXDXXD

SEQ ID NO: 795708 - protein, 103 aa, unidentified
  VARIANT 2: note = Any amino acid
  VARIANT 3: note = Any amino acid
  VARIANT 4: note = Any amino acid
  VARIANT 5: note = Any amino acid
  VARIANT 6: note = Any amino acid
  VARIANT 7: note = Any amino acid
  VARIANT 8: note = Any amino acid
  VARIANT 9: note = Any amino acid
  VARIANT 10: note = Any amino acid
  VARIANT 11: note = Any amino acid
  VARIANT 12: note = Any amino acid
  VARIANT 13: note = Any amino acid
  VARIANT 14: note = Any amino acid
  VARIANT 15: note = Any amino acid
  VARIANT 16: note = Any amino acid
  VARIANT 17: note = Any amino acid
  VARIANT 18: note = Any amino acid
  VARIANT 19: note = Any amino acid
  VARIANT 20: note = Any amino acid
  VARIANT 21: note = Any amino acid
  VARIANT 22: note = Any amino acid
  VARIANT 23: note = Any amino acid
  VARIANT 24: note = Any amino acid
  VARIANT 25: note = Any amino acid
  VARIANT 26: note = Any amino acid
  VARIANT 27: note = Any amino acid
  VARIANT 28: note = Any amino acid
  VARIANT 29: note = Any amino acid
  VARIANT 30: note = Any amino acid
  VARIANT 31: note = Any amino acid
  VARIANT 32: note = Any amino acid
  VARIANT 33: note = Any amino acid
  VARIANT 34: note = Any amino acid
  VARIANT 35: note = Any amino acid
  VARIANT 36: note = Any amino acid
  VARIANT 37: note = Any amino acid
  VARIANT 38: note = Any amino acid
  VARIANT 39: note = Any amino acid
  VARIANT 40: note = Any amino acid
  VARIANT 41: note = Any amino acid
  VARIANT 42: note = Any amino acid
  VARIANT 43: note = Any amino acid
  VARIANT 44: note = Any amino acid
  VARIANT 45: note = Any amino acid
  VARIANT 46: note = Any amino acid
  VARIANT 47: note = Any amino acid
  VARIANT 48: note = Any amino acid
  VARIANT 49: note = Any amino acid
  VARIANT 50: note = Any amino acid
  VARIANT 51: note = Any amino acid
  VARIANT 52: note = Any amino acid
  VARIANT 53: note = Any amino acid
  VARIANT 54: note = Any amino acid
  VARIANT 55: note = Any amino acid
  VARIANT 57: note = Any amino acid
  VARIANT 58: note = Any amino acid
  VARIANT 59: note = Any amino acid
  VARIANT 60: note = Any amino acid
  VARIANT 61: note = Any amino acid
  VARIANT 62: note = Any amino acid
  VARIANT 63: note = Any amino acid
  VARIANT 64: note = Any amino acid
  VARIANT 65: note = Any amino acid
  VARIANT 66: note = Any amino acid
  VARIANT 67: note = Any amino acid
  VARIANT 68: note = Any amino acid
  VARIANT 69: note = Any amino acid
  VARIANT 70: note = Any amino acid
  VARIANT 71: note = Any amino acid
  VARIANT 72: note = Any amino acid
  VARIANT 73: note = Any amino acid
  VARIANT 74: note = Any amino acid
  VARIANT 75: note = Any amino acid
  VARIANT 76: note = Any amino acid
  VARIANT 77: note = Any amino acid
  VARIANT 78: note = Any amino acid
  VARIANT 79: note = Any amino acid
  VARIANT 80: note = Any amino acid
  VARIANT 81: note = Any amino acid
  VARIANT 82: note = Any amino acid
  VARIANT 83: note = Any amino acid
  VARIANT 84: note = Any amino acid
  VARIANT 85: note = Any amino acid
  VARIANT 86: note = Any amino acid
  VARIANT 87: note = Any amino acid
  VARIANT 88: note = Any amino acid
  VARIANT 89: note = Any amino acid
  VARIANT 90: note = Any amino acid
  VARIANT 91: note = Any amino acid
  VARIANT 92: note = Any amino acid
  VARIANT 93: note = Any amino acid
  VARIANT 94: note = Any amino acid
  VARIANT 95: note = Any amino acid
  VARIANT 96: note = Any amino acid
  VARIANT 97: note = Any amino acid
  VARIANT 99: note = Any amino acid
  VARIANT 101: note = Any amino acid
  VARIANT 102: note = Any amino acid
DXXXXXXXXXXXXXXXXXXXXXXXXXXXXXXXXXXXXXXXXXXXXXXXXXXXXXXDXXXXXXXXXXXXXXXXXXXXXXXXXXXXXXXXXXXXXXXXXTXDXXE

SEQ ID NO: 795709 - protein, 93 aa, unidentified
  VARIANT 2: note = Any amino acid
  VARIANT 3: note = Any amino acid
  VARIANT 4: note = Any amino acid
  VARIANT 5: note = Any amino acid
  VARIANT 6: note = Any amino acid
  VARIANT 7: note = Any amino acid
  VARIANT 8: note = Any amino acid
  VARIANT 9: note = Any amino acid
  VARIANT 10: note = Any amino acid
  VARIANT 11: note = Any amino acid
  VARIANT 12: note = Any amino acid
  VARIANT 13: note = Any amino acid
  VARIANT 14: note = Any amino acid
  VARIANT 15: note = Any amino acid
  VARIANT 16: note = Any amino acid
  VARIANT 17: note = Any amino acid
  VARIANT 18: note = Any amino acid
  VARIANT 19: note = Any amino acid
  VARIANT 20: note = Any amino acid
  VARIANT 21: note = Any amino acid
  VARIANT 22: note = Any amino acid
  VARIANT 23: note = Any amino acid
  VARIANT 24: note = Any amino acid
  VARIANT 25: note = Any amino acid
  VARIANT 26: note = Any amino acid
  VARIANT 27: note = Any amino acid
  VARIANT 28: note = Any amino acid
  VARIANT 29: note = Any amino acid
  VARIANT 30: note = Any amino acid
  VARIANT 31: note = Any amino acid
  VARIANT 32: note = Any amino acid
  VARIANT 33: note = Any amino acid
  VARIANT 34: note = Any amino acid
  VARIANT 35: note = Any amino acid
  VARIANT 36: note = Any amino acid
  VARIANT 37: note = Any amino acid
  VARIANT 38: note = Any amino acid
  VARIANT 39: note = Any amino acid
  VARIANT 40: note = Any amino acid
  VARIANT 41: note = Any amino acid
  VARIANT 42: note = Any amino acid
  VARIANT 43: note = Any amino acid
  VARIANT 44: note = Any amino acid
  VARIANT 45: note = Any amino acid
  VARIANT 46: note = Any amino acid
  VARIANT 47: note = Any amino acid
  VARIANT 48: note = Any amino acid
  VARIANT 49: note = Any amino acid
  VARIANT 50: note = Any amino acid
  VARIANT 52: note = Any amino acid
  VARIANT 53: note = Any amino acid
  VARIANT 54: note = Any amino acid
  VARIANT 55: note = Any amino acid
  VARIANT 56: note = Any amino acid
  VARIANT 57: note = Any amino acid
  VARIANT 58: note = Any amino acid
  VARIANT 59: note = Any amino acid
  VARIANT 60: note = Any amino acid
  VARIANT 61: note = Any amino acid
  VARIANT 62: note = Any amino acid
  VARIANT 63: note = Any amino acid
  VARIANT 64: note = Any amino acid
  VARIANT 65: note = Any amino acid
  VARIANT 66: note = Any amino acid
  VARIANT 67: note = Any amino acid
  VARIANT 68: note = Any amino acid
  VARIANT 69: note = Any amino acid
  VARIANT 70: note = Any amino acid
  VARIANT 71: note = Any amino acid
  VARIANT 72: note = Any amino acid
  VARIANT 73: note = Any amino acid
  VARIANT 74: note = Any amino acid
  VARIANT 75: note = Any amino acid
  VARIANT 76: note = Any amino acid
  VARIANT 77: note = Any amino acid
  VARIANT 78: note = Any amino acid
  VARIANT 79: note = Any amino acid
  VARIANT 80: note = Any amino acid
  VARIANT 81: note = Any amino acid
  VARIANT 82: note = Any amino acid
  VARIANT 83: note = Any amino acid
  VARIANT 84: note = Any amino acid
  VARIANT 85: note = Any amino acid
  VARIANT 86: note = Any amino acid
  VARIANT 87: note = Any amino acid
  VARIANT 89: note = Any amino acid
  VARIANT 91: note = Any amino acid
  VARIANT 92: note = Any amino acid
DXXXXXXXXXXXXXXXXXXXXXXXXXXXXXXXXXXXXXXXXXXXXXXXXXEXXXXXXXXXXXXXXXXXXXXXXXXXXXXXXXXXXXXKXDXXD

SEQ ID NO: 795710 - protein, 100 aa, unidentified
  VARIANT 2: note = Any amino acid
  VARIANT 3: note = Any amino acid
  VARIANT 4: note = Any amino acid
  VARIANT 5: note = Any amino acid
  VARIANT 6: note = Any amino acid
  VARIANT 7: note = Any amino acid
  VARIANT 8: note = Any amino acid
  VARIANT 9: note = Any amino acid
  VARIANT 10: note = Any amino acid
  VARIANT 11: note = Any amino acid
  VARIANT 12: note = Any amino acid
  VARIANT 13: note = Any amino acid
  VARIANT 14: note = Any amino acid
  VARIANT 15: note = Any amino acid
  VARIANT 16: note = Any amino acid
  VARIANT 17: note = Any amino acid
  VARIANT 18: note = Any amino acid
  VARIANT 19: note = Any amino acid
  VARIANT 20: note = Any amino acid
  VARIANT 21: note = Any amino acid
  VARIANT 22: note = Any amino acid
  VARIANT 23: note = Any amino acid
  VARIANT 24: note = Any amino acid
  VARIANT 25: note = Any amino acid
  VARIANT 26: note = Any amino acid
  VARIANT 27: note = Any amino acid
  VARIANT 28: note = Any amino acid
  VARIANT 29: note = Any amino acid
  VARIANT 30: note = Any amino acid
  VARIANT 31: note = Any amino acid
  VARIANT 32: note = Any amino acid
  VARIANT 33: note = Any amino acid
  VARIANT 34: note = Any amino acid
  VARIANT 35: note = Any amino acid
  VARIANT 36: note = Any amino acid
  VARIANT 37: note = Any amino acid
  VARIANT 38: note = Any amino acid
  VARIANT 39: note = Any amino acid
  VARIANT 40: note = Any amino acid
  VARIANT 41: note = Any amino acid
  VARIANT 42: note = Any amino acid
  VARIANT 43: note = Any amino acid
  VARIANT 44: note = Any amino acid
  VARIANT 45: note = Any amino acid
  VARIANT 46: note = Any amino acid
  VARIANT 47: note = Any amino acid
  VARIANT 48: note = Any amino acid
  VARIANT 49: note = Any amino acid
  VARIANT 50: note = Any amino acid
  VARIANT 51: note = Any amino acid
  VARIANT 52: note = Any amino acid
  VARIANT 53: note = Any amino acid
  VARIANT 55: note = Any amino acid
  VARIANT 56: note = Any amino acid
  VARIANT 57: note = Any amino acid
  VARIANT 58: note = Any amino acid
  VARIANT 59: note = Any amino acid
  VARIANT 60: note = Any amino acid
  VARIANT 61: note = Any amino acid
  VARIANT 62: note = Any amino acid
  VARIANT 63: note = Any amino acid
  VARIANT 64: note = Any amino acid
  VARIANT 65: note = Any amino acid
  VARIANT 66: note = Any amino acid
  VARIANT 67: note = Any amino acid
  VARIANT 68: note = Any amino acid
  VARIANT 69: note = Any amino acid
  VARIANT 70: note = Any amino acid
  VARIANT 71: note = Any amino acid
  VARIANT 72: note = Any amino acid
  VARIANT 73: note = Any amino acid
  VARIANT 74: note = Any amino acid
  VARIANT 75: note = Any amino acid
  VARIANT 76: note = Any amino acid
  VARIANT 77: note = Any amino acid
  VARIANT 78: note = Any amino acid
  VARIANT 79: note = Any amino acid
  VARIANT 80: note = Any amino acid
  VARIANT 81: note = Any amino acid
  VARIANT 82: note = Any amino acid
  VARIANT 83: note = Any amino acid
  VARIANT 84: note = Any amino acid
  VARIANT 85: note = Any amino acid
  VARIANT 86: note = Any amino acid
  VARIANT 87: note = Any amino acid
  VARIANT 88: note = Any amino acid
  VARIANT 89: note = Any amino acid
  VARIANT 90: note = Any amino acid
  VARIANT 91: note = Any amino acid
  VARIANT 92: note = Any amino acid
  VARIANT 93: note = Any amino acid
  VARIANT 94: note = Any amino acid
  VARIANT 96: note = Any amino acid
  VARIANT 98: note = Any amino acid
  VARIANT 99: note = Any amino acid
DXXXXXXXXXXXXXXXXXXXXXXXXXXXXXXXXXXXXXXXXXXXXXXXXXXXXDXXXXXXXXXXXXXXXXXXXXXXXXXXXXXXXXXXXXXXXXKXDXXD

SEQ ID NO: 795711 - protein, 106 aa, unidentified
  VARIANT 2: note = Any amino acid
  VARIANT 3: note = Any amino acid
  VARIANT 4: note = Any amino acid
  VARIANT 5: note = Any amino acid
  VARIANT 6: note = Any amino acid
  VARIANT 7: note = Any amino acid
  VARIANT 8: note = Any amino acid
  VARIANT 9: note = Any amino acid
  VARIANT 10: note = Any amino acid
  VARIANT 11: note = Any amino acid
  VARIANT 12: note = Any amino acid
  VARIANT 13: note = Any amino acid
  VARIANT 14: note = Any amino acid
  VARIANT 15: note = Any amino acid
  VARIANT 16: note = Any amino acid
  VARIANT 17: note = Any amino acid
  VARIANT 18: note = Any amino acid
  VARIANT 19: note = Any amino acid
  VARIANT 20: note = Any amino acid
  VARIANT 21: note = Any amino acid
  VARIANT 22: note = Any amino acid
  VARIANT 23: note = Any amino acid
  VARIANT 24: note = Any amino acid
  VARIANT 25: note = Any amino acid
  VARIANT 26: note = Any amino acid
  VARIANT 27: note = Any amino acid
  VARIANT 28: note = Any amino acid
  VARIANT 29: note = Any amino acid
  VARIANT 30: note = Any amino acid
  VARIANT 31: note = Any amino acid
  VARIANT 32: note = Any amino acid
  VARIANT 33: note = Any amino acid
  VARIANT 34: note = Any amino acid
  VARIANT 35: note = Any amino acid
  VARIANT 36: note = Any amino acid
  VARIANT 37: note = Any amino acid
  VARIANT 38: note = Any amino acid
  VARIANT 39: note = Any amino acid
  VARIANT 40: note = Any amino acid
  VARIANT 41: note = Any amino acid
  VARIANT 42: note = Any amino acid
  VARIANT 43: note = Any amino acid
  VARIANT 44: note = Any amino acid
  VARIANT 45: note = Any amino acid
  VARIANT 46: note = Any amino acid
  VARIANT 47: note = Any amino acid
  VARIANT 48: note = Any amino acid
  VARIANT 49: note = Any amino acid
  VARIANT 50: note = Any amino acid
  VARIANT 51: note = Any amino acid
  VARIANT 52: note = Any amino acid
  VARIANT 53: note = Any amino acid
  VARIANT 54: note = Any amino acid
  VARIANT 55: note = Any amino acid
  VARIANT 56: note = Any amino acid
  VARIANT 57: note = Any amino acid
  VARIANT 58: note = Any amino acid
  VARIANT 60: note = Any amino acid
  VARIANT 61: note = Any amino acid
  VARIANT 62: note = Any amino acid
  VARIANT 63: note = Any amino acid
  VARIANT 64: note = Any amino acid
  VARIANT 65: note = Any amino acid
  VARIANT 66: note = Any amino acid
  VARIANT 67: note = Any amino acid
  VARIANT 68: note = Any amino acid
  VARIANT 69: note = Any amino acid
  VARIANT 70: note = Any amino acid
  VARIANT 71: note = Any amino acid
  VARIANT 72: note = Any amino acid
  VARIANT 73: note = Any amino acid
  VARIANT 74: note = Any amino acid
  VARIANT 75: note = Any amino acid
  VARIANT 76: note = Any amino acid
  VARIANT 77: note = Any amino acid
  VARIANT 78: note = Any amino acid
  VARIANT 79: note = Any amino acid
  VARIANT 80: note = Any amino acid
  VARIANT 81: note = Any amino acid
  VARIANT 82: note = Any amino acid
  VARIANT 83: note = Any amino acid
  VARIANT 84: note = Any amino acid
  VARIANT 85: note = Any amino acid
  VARIANT 86: note = Any amino acid
  VARIANT 87: note = Any amino acid
  VARIANT 88: note = Any amino acid
  VARIANT 89: note = Any amino acid
  VARIANT 90: note = Any amino acid
  VARIANT 91: note = Any amino acid
  VARIANT 92: note = Any amino acid
  VARIANT 93: note = Any amino acid
  VARIANT 94: note = Any amino acid
  VARIANT 95: note = Any amino acid
  VARIANT 96: note = Any amino acid
  VARIANT 97: note = Any amino acid
  VARIANT 98: note = Any amino acid
  VARIANT 99: note = Any amino acid
  VARIANT 100: note = Any amino acid
  VARIANT 102: note = Any amino acid
  VARIANT 104: note = Any amino acid
  VARIANT 105: note = Any amino acid
DXXXXXXXXXXXXXXXXXXXXXXXXXXXXXXXXXXXXXXXXXXXXXXXXXXXXXXXXXEXXXXXXXXXXXXXXXXXXXXXXXXXXXXXXXXXXXXXXXXXKXDXXD

SEQ ID NO: 795712 - protein, 92 aa, unidentified
  VARIANT 2: note = Any amino acid
  VARIANT 3: note = Any amino acid
  VARIANT 4: note = Any amino acid
  VARIANT 5: note = Any amino acid
  VARIANT 6: note = Any amino acid
  VARIANT 7: note = Any amino acid
  VARIANT 8: note = Any amino acid
  VARIANT 9: note = Any amino acid
  VARIANT 10: note = Any amino acid
  VARIANT 11: note = Any amino acid
  VARIANT 12: note = Any amino acid
  VARIANT 13: note = Any amino acid
  VARIANT 14: note = Any amino acid
  VARIANT 15: note = Any amino acid
  VARIANT 16: note = Any amino acid
  VARIANT 17: note = Any amino acid
  VARIANT 18: note = Any amino acid
  VARIANT 19: note = Any amino acid
  VARIANT 20: note = Any amino acid
  VARIANT 21: note = Any amino acid
  VARIANT 22: note = Any amino acid
  VARIANT 23: note = Any amino acid
  VARIANT 24: note = Any amino acid
  VARIANT 25: note = Any amino acid
  VARIANT 26: note = Any amino acid
  VARIANT 27: note = Any amino acid
  VARIANT 28: note = Any amino acid
  VARIANT 29: note = Any amino acid
  VARIANT 30: note = Any amino acid
  VARIANT 31: note = Any amino acid
  VARIANT 32: note = Any amino acid
  VARIANT 33: note = Any amino acid
  VARIANT 34: note = Any amino acid
  VARIANT 35: note = Any amino acid
  VARIANT 36: note = Any amino acid
  VARIANT 37: note = Any amino acid
  VARIANT 38: note = Any amino acid
  VARIANT 39: note = Any amino acid
  VARIANT 40: note = Any amino acid
  VARIANT 41: note = Any amino acid
  VARIANT 42: note = Any amino acid
  VARIANT 43: note = Any amino acid
  VARIANT 44: note = Any amino acid
  VARIANT 45: note = Any amino acid
  VARIANT 46: note = Any amino acid
  VARIANT 48: note = Any amino acid
  VARIANT 49: note = Any amino acid
  VARIANT 50: note = Any amino acid
  VARIANT 51: note = Any amino acid
  VARIANT 52: note = Any amino acid
  VARIANT 53: note = Any amino acid
  VARIANT 54: note = Any amino acid
  VARIANT 55: note = Any amino acid
  VARIANT 56: note = Any amino acid
  VARIANT 57: note = Any amino acid
  VARIANT 58: note = Any amino acid
  VARIANT 59: note = Any amino acid
  VARIANT 60: note = Any amino acid
  VARIANT 61: note = Any amino acid
  VARIANT 62: note = Any amino acid
  VARIANT 63: note = Any amino acid
  VARIANT 64: note = Any amino acid
  VARIANT 65: note = Any amino acid
  VARIANT 66: note = Any amino acid
  VARIANT 67: note = Any amino acid
  VARIANT 68: note = Any amino acid
  VARIANT 69: note = Any amino acid
  VARIANT 70: note = Any amino acid
  VARIANT 71: note = Any amino acid
  VARIANT 72: note = Any amino acid
  VARIANT 73: note = Any amino acid
  VARIANT 74: note = Any amino acid
  VARIANT 75: note = Any amino acid
  VARIANT 76: note = Any amino acid
  VARIANT 77: note = Any amino acid
  VARIANT 78: note = Any amino acid
  VARIANT 79: note = Any amino acid
  VARIANT 80: note = Any amino acid
  VARIANT 81: note = Any amino acid
  VARIANT 82: note = Any amino acid
  VARIANT 83: note = Any amino acid
  VARIANT 84: note = Any amino acid
  VARIANT 85: note = Any amino acid
  VARIANT 86: note = Any amino acid
  VARIANT 88: note = Any amino acid
  VARIANT 90: note = Any amino acid
  VARIANT 91: note = Any amino acid
DXXXXXXXXXXXXXXXXXXXXXXXXXXXXXXXXXXXXXXXXXXXXXDXXXXXXXXXXXXXXXXXXXXXXXXXXXXXXXXXXXXXXXKXDXXD

SEQ ID NO: 795713 - protein, 102 aa, unidentified
  VARIANT 2: note = Any amino acid
  VARIANT 3: note = Any amino acid
  VARIANT 4: note = Any amino acid
  VARIANT 5: note = Any amino acid
  VARIANT 6: note = Any amino acid
  VARIANT 7: note = Any amino acid
  VARIANT 8: note = Any amino acid
  VARIANT 9: note = Any amino acid
  VARIANT 10: note = Any amino acid
  VARIANT 11: note = Any amino acid
  VARIANT 12: note = Any amino acid
  VARIANT 13: note = Any amino acid
  VARIANT 14: note = Any amino acid
  VARIANT 15: note = Any amino acid
  VARIANT 16: note = Any amino acid
  VARIANT 17: note = Any amino acid
  VARIANT 18: note = Any amino acid
  VARIANT 19: note = Any amino acid
  VARIANT 20: note = Any amino acid
  VARIANT 21: note = Any amino acid
  VARIANT 22: note = Any amino acid
  VARIANT 23: note = Any amino acid
  VARIANT 24: note = Any amino acid
  VARIANT 25: note = Any amino acid
  VARIANT 26: note = Any amino acid
  VARIANT 27: note = Any amino acid
  VARIANT 28: note = Any amino acid
  VARIANT 29: note = Any amino acid
  VARIANT 30: note = Any amino acid
  VARIANT 31: note = Any amino acid
  VARIANT 32: note = Any amino acid
  VARIANT 33: note = Any amino acid
  VARIANT 34: note = Any amino acid
  VARIANT 35: note = Any amino acid
  VARIANT 36: note = Any amino acid
  VARIANT 37: note = Any amino acid
  VARIANT 38: note = Any amino acid
  VARIANT 39: note = Any amino acid
  VARIANT 40: note = Any amino acid
  VARIANT 41: note = Any amino acid
  VARIANT 42: note = Any amino acid
  VARIANT 43: note = Any amino acid
  VARIANT 44: note = Any amino acid
  VARIANT 45: note = Any amino acid
  VARIANT 46: note = Any amino acid
  VARIANT 47: note = Any amino acid
  VARIANT 48: note = Any amino acid
  VARIANT 49: note = Any amino acid
  VARIANT 50: note = Any amino acid
  VARIANT 51: note = Any amino acid
  VARIANT 52: note = Any amino acid
  VARIANT 53: note = Any amino acid
  VARIANT 54: note = Any amino acid
  VARIANT 55: note = Any amino acid
  VARIANT 56: note = Any amino acid
  VARIANT 58: note = Any amino acid
  VARIANT 59: note = Any amino acid
  VARIANT 60: note = Any amino acid
  VARIANT 61: note = Any amino acid
  VARIANT 62: note = Any amino acid
  VARIANT 63: note = Any amino acid
  VARIANT 64: note = Any amino acid
  VARIANT 65: note = Any amino acid
  VARIANT 66: note = Any amino acid
  VARIANT 67: note = Any amino acid
  VARIANT 68: note = Any amino acid
  VARIANT 69: note = Any amino acid
  VARIANT 70: note = Any amino acid
  VARIANT 71: note = Any amino acid
  VARIANT 72: note = Any amino acid
  VARIANT 73: note = Any amino acid
  VARIANT 74: note = Any amino acid
  VARIANT 75: note = Any amino acid
  VARIANT 76: note = Any amino acid
  VARIANT 77: note = Any amino acid
  VARIANT 78: note = Any amino acid
  VARIANT 79: note = Any amino acid
  VARIANT 80: note = Any amino acid
  VARIANT 81: note = Any amino acid
  VARIANT 82: note = Any amino acid
  VARIANT 83: note = Any amino acid
  VARIANT 84: note = Any amino acid
  VARIANT 85: note = Any amino acid
  VARIANT 86: note = Any amino acid
  VARIANT 87: note = Any amino acid
  VARIANT 88: note = Any amino acid
  VARIANT 89: note = Any amino acid
  VARIANT 90: note = Any amino acid
  VARIANT 91: note = Any amino acid
  VARIANT 92: note = Any amino acid
  VARIANT 93: note = Any amino acid
  VARIANT 94: note = Any amino acid
  VARIANT 95: note = Any amino acid
  VARIANT 96: note = Any amino acid
  VARIANT 98: note = Any amino acid
  VARIANT 100: note = Any amino acid
  VARIANT 101: note = Any amino acid
DXXXXXXXXXXXXXXXXXXXXXXXXXXXXXXXXXXXXXXXXXXXXXXXXXXXXXXXEXXXXXXXXXXXXXXXXXXXXXXXXXXXXXXXXXXXXXXXIXDXXS

SEQ ID NO: 795714 - protein, 97 aa, unidentified
  VARIANT 2: note = Any amino acid
  VARIANT 3: note = Any amino acid
  VARIANT 4: note = Any amino acid
  VARIANT 5: note = Any amino acid
  VARIANT 6: note = Any amino acid
  VARIANT 7: note = Any amino acid
  VARIANT 8: note = Any amino acid
  VARIANT 9: note = Any amino acid
  VARIANT 10: note = Any amino acid
  VARIANT 11: note = Any amino acid
  VARIANT 12: note = Any amino acid
  VARIANT 13: note = Any amino acid
  VARIANT 14: note = Any amino acid
  VARIANT 15: note = Any amino acid
  VARIANT 16: note = Any amino acid
  VARIANT 17: note = Any amino acid
  VARIANT 18: note = Any amino acid
  VARIANT 19: note = Any amino acid
  VARIANT 20: note = Any amino acid
  VARIANT 21: note = Any amino acid
  VARIANT 22: note = Any amino acid
  VARIANT 23: note = Any amino acid
  VARIANT 24: note = Any amino acid
  VARIANT 25: note = Any amino acid
  VARIANT 26: note = Any amino acid
  VARIANT 27: note = Any amino acid
  VARIANT 28: note = Any amino acid
  VARIANT 29: note = Any amino acid
  VARIANT 30: note = Any amino acid
  VARIANT 31: note = Any amino acid
  VARIANT 32: note = Any amino acid
  VARIANT 33: note = Any amino acid
  VARIANT 34: note = Any amino acid
  VARIANT 35: note = Any amino acid
  VARIANT 36: note = Any amino acid
  VARIANT 37: note = Any amino acid
  VARIANT 38: note = Any amino acid
  VARIANT 39: note = Any amino acid
  VARIANT 40: note = Any amino acid
  VARIANT 41: note = Any amino acid
  VARIANT 42: note = Any amino acid
  VARIANT 43: note = Any amino acid
  VARIANT 44: note = Any amino acid
  VARIANT 45: note = Any amino acid
  VARIANT 46: note = Any amino acid
  VARIANT 47: note = Any amino acid
  VARIANT 48: note = Any amino acid
  VARIANT 49: note = Any amino acid
  VARIANT 51: note = Any amino acid
  VARIANT 52: note = Any amino acid
  VARIANT 53: note = Any amino acid
  VARIANT 54: note = Any amino acid
  VARIANT 55: note = Any amino acid
  VARIANT 56: note = Any amino acid
  VARIANT 57: note = Any amino acid
  VARIANT 58: note = Any amino acid
  VARIANT 59: note = Any amino acid
  VARIANT 60: note = Any amino acid
  VARIANT 61: note = Any amino acid
  VARIANT 62: note = Any amino acid
  VARIANT 63: note = Any amino acid
  VARIANT 64: note = Any amino acid
  VARIANT 65: note = Any amino acid
  VARIANT 66: note = Any amino acid
  VARIANT 67: note = Any amino acid
  VARIANT 68: note = Any amino acid
  VARIANT 69: note = Any amino acid
  VARIANT 70: note = Any amino acid
  VARIANT 71: note = Any amino acid
  VARIANT 72: note = Any amino acid
  VARIANT 73: note = Any amino acid
  VARIANT 74: note = Any amino acid
  VARIANT 75: note = Any amino acid
  VARIANT 76: note = Any amino acid
  VARIANT 77: note = Any amino acid
  VARIANT 78: note = Any amino acid
  VARIANT 79: note = Any amino acid
  VARIANT 80: note = Any amino acid
  VARIANT 81: note = Any amino acid
  VARIANT 82: note = Any amino acid
  VARIANT 83: note = Any amino acid
  VARIANT 84: note = Any amino acid
  VARIANT 85: note = Any amino acid
  VARIANT 86: note = Any amino acid
  VARIANT 87: note = Any amino acid
  VARIANT 88: note = Any amino acid
  VARIANT 89: note = Any amino acid
  VARIANT 90: note = Any amino acid
  VARIANT 91: note = Any amino acid
  VARIANT 93: note = Any amino acid
  VARIANT 95: note = Any amino acid
  VARIANT 96: note = Any amino acid
DXXXXXXXXXXXXXXXXXXXXXXXXXXXXXXXXXXXXXXXXXXXXXXXXAXXXXXXXXXXXXXXXXXXXXXXXXXXXXXXXXXXXXXXXXXKXDXXD

SEQ ID NO: 795715 - protein, 103 aa, unidentified
  VARIANT 2: note = Any amino acid
  VARIANT 3: note = Any amino acid
  VARIANT 4: note = Any amino acid
  VARIANT 5: note = Any amino acid
  VARIANT 6: note = Any amino acid
  VARIANT 7: note = Any amino acid
  VARIANT 8: note = Any amino acid
  VARIANT 9: note = Any amino acid
  VARIANT 10: note = Any amino acid
  VARIANT 11: note = Any amino acid
  VARIANT 12: note = Any amino acid
  VARIANT 13: note = Any amino acid
  VARIANT 14: note = Any amino acid
  VARIANT 15: note = Any amino acid
  VARIANT 16: note = Any amino acid
  VARIANT 17: note = Any amino acid
  VARIANT 18: note = Any amino acid
  VARIANT 19: note = Any amino acid
  VARIANT 20: note = Any amino acid
  VARIANT 21: note = Any amino acid
  VARIANT 22: note = Any amino acid
  VARIANT 23: note = Any amino acid
  VARIANT 24: note = Any amino acid
  VARIANT 25: note = Any amino acid
  VARIANT 26: note = Any amino acid
  VARIANT 27: note = Any amino acid
  VARIANT 28: note = Any amino acid
  VARIANT 29: note = Any amino acid
  VARIANT 30: note = Any amino acid
  VARIANT 31: note = Any amino acid
  VARIANT 32: note = Any amino acid
  VARIANT 33: note = Any amino acid
  VARIANT 34: note = Any amino acid
  VARIANT 35: note = Any amino acid
  VARIANT 36: note = Any amino acid
  VARIANT 37: note = Any amino acid
  VARIANT 38: note = Any amino acid
  VARIANT 39: note = Any amino acid
  VARIANT 40: note = Any amino acid
  VARIANT 41: note = Any amino acid
  VARIANT 42: note = Any amino acid
  VARIANT 43: note = Any amino acid
  VARIANT 44: note = Any amino acid
  VARIANT 45: note = Any amino acid
  VARIANT 46: note = Any amino acid
  VARIANT 47: note = Any amino acid
  VARIANT 48: note = Any amino acid
  VARIANT 49: note = Any amino acid
  VARIANT 50: note = Any amino acid
  VARIANT 51: note = Any amino acid
  VARIANT 52: note = Any amino acid
  VARIANT 53: note = Any amino acid
  VARIANT 54: note = Any amino acid
  VARIANT 55: note = Any amino acid
  VARIANT 57: note = Any amino acid
  VARIANT 58: note = Any amino acid
  VARIANT 59: note = Any amino acid
  VARIANT 60: note = Any amino acid
  VARIANT 61: note = Any amino acid
  VARIANT 62: note = Any amino acid
  VARIANT 63: note = Any amino acid
  VARIANT 64: note = Any amino acid
  VARIANT 65: note = Any amino acid
  VARIANT 66: note = Any amino acid
  VARIANT 67: note = Any amino acid
  VARIANT 68: note = Any amino acid
  VARIANT 69: note = Any amino acid
  VARIANT 70: note = Any amino acid
  VARIANT 71: note = Any amino acid
  VARIANT 72: note = Any amino acid
  VARIANT 73: note = Any amino acid
  VARIANT 74: note = Any amino acid
  VARIANT 75: note = Any amino acid
  VARIANT 76: note = Any amino acid
  VARIANT 77: note = Any amino acid
  VARIANT 78: note = Any amino acid
  VARIANT 79: note = Any amino acid
  VARIANT 80: note = Any amino acid
  VARIANT 81: note = Any amino acid
  VARIANT 82: note = Any amino acid
  VARIANT 83: note = Any amino acid
  VARIANT 84: note = Any amino acid
  VARIANT 85: note = Any amino acid
  VARIANT 86: note = Any amino acid
  VARIANT 87: note = Any amino acid
  VARIANT 88: note = Any amino acid
  VARIANT 89: note = Any amino acid
  VARIANT 90: note = Any amino acid
  VARIANT 91: note = Any amino acid
  VARIANT 92: note = Any amino acid
  VARIANT 93: note = Any amino acid
  VARIANT 94: note = Any amino acid
  VARIANT 95: note = Any amino acid
  VARIANT 96: note = Any amino acid
  VARIANT 97: note = Any amino acid
  VARIANT 99: note = Any amino acid
  VARIANT 101: note = Any amino acid
  VARIANT 102: note = Any amino acid
DXXXXXXXXXXXXXXXXXXXXXXXXXXXXXXXXXXXXXXXXXXXXXXXXXXXXXXDXXXXXXXXXXXXXXXXXXXXXXXXXXXXXXXXXXXXXXXXXKXDXXE

SEQ ID NO: 795716 - protein, 94 aa, unidentified
  VARIANT 2: note = Any amino acid
  VARIANT 3: note = Any amino acid
  VARIANT 4: note = Any amino acid
  VARIANT 5: note = Any amino acid
  VARIANT 6: note = Any amino acid
  VARIANT 7: note = Any amino acid
  VARIANT 8: note = Any amino acid
  VARIANT 9: note = Any amino acid
  VARIANT 10: note = Any amino acid
  VARIANT 11: note = Any amino acid
  VARIANT 12: note = Any amino acid
  VARIANT 13: note = Any amino acid
  VARIANT 14: note = Any amino acid
  VARIANT 15: note = Any amino acid
  VARIANT 16: note = Any amino acid
  VARIANT 17: note = Any amino acid
  VARIANT 18: note = Any amino acid
  VARIANT 19: note = Any amino acid
  VARIANT 20: note = Any amino acid
  VARIANT 21: note = Any amino acid
  VARIANT 22: note = Any amino acid
  VARIANT 23: note = Any amino acid
  VARIANT 24: note = Any amino acid
  VARIANT 25: note = Any amino acid
  VARIANT 26: note = Any amino acid
  VARIANT 27: note = Any amino acid
  VARIANT 28: note = Any amino acid
  VARIANT 29: note = Any amino acid
  VARIANT 30: note = Any amino acid
  VARIANT 31: note = Any amino acid
  VARIANT 32: note = Any amino acid
  VARIANT 33: note = Any amino acid
  VARIANT 34: note = Any amino acid
  VARIANT 35: note = Any amino acid
  VARIANT 36: note = Any amino acid
  VARIANT 37: note = Any amino acid
  VARIANT 38: note = Any amino acid
  VARIANT 39: note = Any amino acid
  VARIANT 40: note = Any amino acid
  VARIANT 41: note = Any amino acid
  VARIANT 42: note = Any amino acid
  VARIANT 43: note = Any amino acid
  VARIANT 44: note = Any amino acid
  VARIANT 45: note = Any amino acid
  VARIANT 46: note = Any amino acid
  VARIANT 47: note = Any amino acid
  VARIANT 48: note = Any amino acid
  VARIANT 49: note = Any amino acid
  VARIANT 50: note = Any amino acid
  VARIANT 51: note = Any amino acid
  VARIANT 52: note = Any amino acid
  VARIANT 53: note = Any amino acid
  VARIANT 55: note = Any amino acid
  VARIANT 56: note = Any amino acid
  VARIANT 57: note = Any amino acid
  VARIANT 58: note = Any amino acid
  VARIANT 59: note = Any amino acid
  VARIANT 60: note = Any amino acid
  VARIANT 61: note = Any amino acid
  VARIANT 62: note = Any amino acid
  VARIANT 63: note = Any amino acid
  VARIANT 64: note = Any amino acid
  VARIANT 65: note = Any amino acid
  VARIANT 66: note = Any amino acid
  VARIANT 67: note = Any amino acid
  VARIANT 68: note = Any amino acid
  VARIANT 69: note = Any amino acid
  VARIANT 70: note = Any amino acid
  VARIANT 71: note = Any amino acid
  VARIANT 72: note = Any amino acid
  VARIANT 73: note = Any amino acid
  VARIANT 74: note = Any amino acid
  VARIANT 75: note = Any amino acid
  VARIANT 76: note = Any amino acid
  VARIANT 77: note = Any amino acid
  VARIANT 78: note = Any amino acid
  VARIANT 79: note = Any amino acid
  VARIANT 80: note = Any amino acid
  VARIANT 81: note = Any amino acid
  VARIANT 82: note = Any amino acid
  VARIANT 83: note = Any amino acid
  VARIANT 84: note = Any amino acid
  VARIANT 85: note = Any amino acid
  VARIANT 86: note = Any amino acid
  VARIANT 87: note = Any amino acid
  VARIANT 88: note = Any amino acid
  VARIANT 90: note = Any amino acid
  VARIANT 92: note = Any amino acid
  VARIANT 93: note = Any amino acid
DXXXXXXXXXXXXXXXXXXXXXXXXXXXXXXXXXXXXXXXXXXXXXXXXXXXXEXXXXXXXXXXXXXXXXXXXXXXXXXXXXXXXXXXKXDXXD

SEQ ID NO: 795717 - protein, 97 aa, unidentified
  VARIANT 2: note = Any amino acid
  VARIANT 3: note = Any amino acid
  VARIANT 4: note = Any amino acid
  VARIANT 5: note = Any amino acid
  VARIANT 6: note = Any amino acid
  VARIANT 7: note = Any amino acid
  VARIANT 8: note = Any amino acid
  VARIANT 9: note = Any amino acid
  VARIANT 10: note = Any amino acid
  VARIANT 11: note = Any amino acid
  VARIANT 12: note = Any amino acid
  VARIANT 13: note = Any amino acid
  VARIANT 14: note = Any amino acid
  VARIANT 15: note = Any amino acid
  VARIANT 16: note = Any amino acid
  VARIANT 17: note = Any amino acid
  VARIANT 18: note = Any amino acid
  VARIANT 19: note = Any amino acid
  VARIANT 20: note = Any amino acid
  VARIANT 21: note = Any amino acid
  VARIANT 22: note = Any amino acid
  VARIANT 23: note = Any amino acid
  VARIANT 24: note = Any amino acid
  VARIANT 25: note = Any amino acid
  VARIANT 26: note = Any amino acid
  VARIANT 27: note = Any amino acid
  VARIANT 28: note = Any amino acid
  VARIANT 29: note = Any amino acid
  VARIANT 30: note = Any amino acid
  VARIANT 31: note = Any amino acid
  VARIANT 32: note = Any amino acid
  VARIANT 33: note = Any amino acid
  VARIANT 34: note = Any amino acid
  VARIANT 35: note = Any amino acid
  VARIANT 36: note = Any amino acid
  VARIANT 37: note = Any amino acid
  VARIANT 38: note = Any amino acid
  VARIANT 39: note = Any amino acid
  VARIANT 40: note = Any amino acid
  VARIANT 41: note = Any amino acid
  VARIANT 42: note = Any amino acid
  VARIANT 43: note = Any amino acid
  VARIANT 44: note = Any amino acid
  VARIANT 45: note = Any amino acid
  VARIANT 46: note = Any amino acid
  VARIANT 47: note = Any amino acid
  VARIANT 48: note = Any amino acid
  VARIANT 49: note = Any amino acid
  VARIANT 51: note = Any amino acid
  VARIANT 52: note = Any amino acid
  VARIANT 53: note = Any amino acid
  VARIANT 54: note = Any amino acid
  VARIANT 55: note = Any amino acid
  VARIANT 56: note = Any amino acid
  VARIANT 57: note = Any amino acid
  VARIANT 58: note = Any amino acid
  VARIANT 59: note = Any amino acid
  VARIANT 60: note = Any amino acid
  VARIANT 61: note = Any amino acid
  VARIANT 62: note = Any amino acid
  VARIANT 63: note = Any amino acid
  VARIANT 64: note = Any amino acid
  VARIANT 65: note = Any amino acid
  VARIANT 66: note = Any amino acid
  VARIANT 67: note = Any amino acid
  VARIANT 68: note = Any amino acid
  VARIANT 69: note = Any amino acid
  VARIANT 70: note = Any amino acid
  VARIANT 71: note = Any amino acid
  VARIANT 72: note = Any amino acid
  VARIANT 73: note = Any amino acid
  VARIANT 74: note = Any amino acid
  VARIANT 75: note = Any amino acid
  VARIANT 76: note = Any amino acid
  VARIANT 77: note = Any amino acid
  VARIANT 78: note = Any amino acid
  VARIANT 79: note = Any amino acid
  VARIANT 80: note = Any amino acid
  VARIANT 81: note = Any amino acid
  VARIANT 82: note = Any amino acid
  VARIANT 83: note = Any amino acid
  VARIANT 84: note = Any amino acid
  VARIANT 85: note = Any amino acid
  VARIANT 86: note = Any amino acid
  VARIANT 87: note = Any amino acid
  VARIANT 88: note = Any amino acid
  VARIANT 89: note = Any amino acid
  VARIANT 90: note = Any amino acid
  VARIANT 91: note = Any amino acid
  VARIANT 93: note = Any amino acid
  VARIANT 95: note = Any amino acid
  VARIANT 96: note = Any amino acid
DXXXXXXXXXXXXXXXXXXXXXXXXXXXXXXXXXXXXXXXXXXXXXXXXEXXXXXXXXXXXXXXXXXXXXXXXXXXXXXXXXXXXXXXXXXKXDXXD

SEQ ID NO: 795718 - protein, 102 aa, unidentified
  VARIANT 2: note = Any amino acid
  VARIANT 3: note = Any amino acid
  VARIANT 4: note = Any amino acid
  VARIANT 5: note = Any amino acid
  VARIANT 6: note = Any amino acid
  VARIANT 7: note = Any amino acid
  VARIANT 8: note = Any amino acid
  VARIANT 9: note = Any amino acid
  VARIANT 10: note = Any amino acid
  VARIANT 11: note = Any amino acid
  VARIANT 12: note = Any amino acid
  VARIANT 13: note = Any amino acid
  VARIANT 14: note = Any amino acid
  VARIANT 15: note = Any amino acid
  VARIANT 16: note = Any amino acid
  VARIANT 17: note = Any amino acid
  VARIANT 18: note = Any amino acid
  VARIANT 19: note = Any amino acid
  VARIANT 20: note = Any amino acid
  VARIANT 21: note = Any amino acid
  VARIANT 22: note = Any amino acid
  VARIANT 23: note = Any amino acid
  VARIANT 24: note = Any amino acid
  VARIANT 25: note = Any amino acid
  VARIANT 26: note = Any amino acid
  VARIANT 27: note = Any amino acid
  VARIANT 28: note = Any amino acid
  VARIANT 29: note = Any amino acid
  VARIANT 30: note = Any amino acid
  VARIANT 31: note = Any amino acid
  VARIANT 32: note = Any amino acid
  VARIANT 33: note = Any amino acid
  VARIANT 34: note = Any amino acid
  VARIANT 35: note = Any amino acid
  VARIANT 36: note = Any amino acid
  VARIANT 37: note = Any amino acid
  VARIANT 38: note = Any amino acid
  VARIANT 39: note = Any amino acid
  VARIANT 40: note = Any amino acid
  VARIANT 41: note = Any amino acid
  VARIANT 42: note = Any amino acid
  VARIANT 43: note = Any amino acid
  VARIANT 44: note = Any amino acid
  VARIANT 45: note = Any amino acid
  VARIANT 46: note = Any amino acid
  VARIANT 47: note = Any amino acid
  VARIANT 48: note = Any amino acid
  VARIANT 49: note = Any amino acid
  VARIANT 50: note = Any amino acid
  VARIANT 51: note = Any amino acid
  VARIANT 52: note = Any amino acid
  VARIANT 53: note = Any amino acid
  VARIANT 54: note = Any amino acid
  VARIANT 55: note = Any amino acid
  VARIANT 56: note = Any amino acid
  VARIANT 58: note = Any amino acid
  VARIANT 59: note = Any amino acid
  VARIANT 60: note = Any amino acid
  VARIANT 61: note = Any amino acid
  VARIANT 62: note = Any amino acid
  VARIANT 63: note = Any amino acid
  VARIANT 64: note = Any amino acid
  VARIANT 65: note = Any amino acid
  VARIANT 66: note = Any amino acid
  VARIANT 67: note = Any amino acid
  VARIANT 68: note = Any amino acid
  VARIANT 69: note = Any amino acid
  VARIANT 70: note = Any amino acid
  VARIANT 71: note = Any amino acid
  VARIANT 72: note = Any amino acid
  VARIANT 73: note = Any amino acid
  VARIANT 74: note = Any amino acid
  VARIANT 75: note = Any amino acid
  VARIANT 76: note = Any amino acid
  VARIANT 77: note = Any amino acid
  VARIANT 78: note = Any amino acid
  VARIANT 79: note = Any amino acid
  VARIANT 80: note = Any amino acid
  VARIANT 81: note = Any amino acid
  VARIANT 82: note = Any amino acid
  VARIANT 83: note = Any amino acid
  VARIANT 84: note = Any amino acid
  VARIANT 85: note = Any amino acid
  VARIANT 86: note = Any amino acid
  VARIANT 87: note = Any amino acid
  VARIANT 88: note = Any amino acid
  VARIANT 89: note = Any amino acid
  VARIANT 90: note = Any amino acid
  VARIANT 91: note = Any amino acid
  VARIANT 92: note = Any amino acid
  VARIANT 93: note = Any amino acid
  VARIANT 94: note = Any amino acid
  VARIANT 95: note = Any amino acid
  VARIANT 96: note = Any amino acid
  VARIANT 98: note = Any amino acid
  VARIANT 100: note = Any amino acid
  VARIANT 101: note = Any amino acid
DXXXXXXXXXXXXXXXXXXXXXXXXXXXXXXXXXXXXXXXXXXXXXXXXXXXXXXXEXXXXXXXXXXXXXXXXXXXXXXXXXXXXXXXXXXXXXXXVXDXXS

SEQ ID NO: 795719 - protein, 90 aa, unidentified
  VARIANT 2: note = Any amino acid
  VARIANT 3: note = Any amino acid
  VARIANT 4: note = Any amino acid
  VARIANT 5: note = Any amino acid
  VARIANT 6: note = Any amino acid
  VARIANT 7: note = Any amino acid
  VARIANT 8: note = Any amino acid
  VARIANT 9: note = Any amino acid
  VARIANT 10: note = Any amino acid
  VARIANT 11: note = Any amino acid
  VARIANT 12: note = Any amino acid
  VARIANT 13: note = Any amino acid
  VARIANT 14: note = Any amino acid
  VARIANT 15: note = Any amino acid
  VARIANT 16: note = Any amino acid
  VARIANT 17: note = Any amino acid
  VARIANT 18: note = Any amino acid
  VARIANT 19: note = Any amino acid
  VARIANT 20: note = Any amino acid
  VARIANT 21: note = Any amino acid
  VARIANT 22: note = Any amino acid
  VARIANT 23: note = Any amino acid
  VARIANT 24: note = Any amino acid
  VARIANT 25: note = Any amino acid
  VARIANT 26: note = Any amino acid
  VARIANT 27: note = Any amino acid
  VARIANT 28: note = Any amino acid
  VARIANT 29: note = Any amino acid
  VARIANT 30: note = Any amino acid
  VARIANT 31: note = Any amino acid
  VARIANT 32: note = Any amino acid
  VARIANT 33: note = Any amino acid
  VARIANT 34: note = Any amino acid
  VARIANT 35: note = Any amino acid
  VARIANT 36: note = Any amino acid
  VARIANT 37: note = Any amino acid
  VARIANT 38: note = Any amino acid
  VARIANT 39: note = Any amino acid
  VARIANT 40: note = Any amino acid
  VARIANT 41: note = Any amino acid
  VARIANT 42: note = Any amino acid
  VARIANT 43: note = Any amino acid
  VARIANT 44: note = Any amino acid
  VARIANT 45: note = Any amino acid
  VARIANT 46: note = Any amino acid
  VARIANT 48: note = Any amino acid
  VARIANT 49: note = Any amino acid
  VARIANT 50: note = Any amino acid
  VARIANT 51: note = Any amino acid
  VARIANT 52: note = Any amino acid
  VARIANT 53: note = Any amino acid
  VARIANT 54: note = Any amino acid
  VARIANT 55: note = Any amino acid
  VARIANT 56: note = Any amino acid
  VARIANT 57: note = Any amino acid
  VARIANT 58: note = Any amino acid
  VARIANT 59: note = Any amino acid
  VARIANT 60: note = Any amino acid
  VARIANT 61: note = Any amino acid
  VARIANT 62: note = Any amino acid
  VARIANT 63: note = Any amino acid
  VARIANT 64: note = Any amino acid
  VARIANT 65: note = Any amino acid
  VARIANT 66: note = Any amino acid
  VARIANT 67: note = Any amino acid
  VARIANT 68: note = Any amino acid
  VARIANT 69: note = Any amino acid
  VARIANT 70: note = Any amino acid
  VARIANT 71: note = Any amino acid
  VARIANT 72: note = Any amino acid
  VARIANT 73: note = Any amino acid
  VARIANT 74: note = Any amino acid
  VARIANT 75: note = Any amino acid
  VARIANT 76: note = Any amino acid
  VARIANT 77: note = Any amino acid
  VARIANT 78: note = Any amino acid
  VARIANT 79: note = Any amino acid
  VARIANT 80: note = Any amino acid
  VARIANT 81: note = Any amino acid
  VARIANT 82: note = Any amino acid
  VARIANT 83: note = Any amino acid
  VARIANT 84: note = Any amino acid
  VARIANT 86: note = Any amino acid
  VARIANT 88: note = Any amino acid
  VARIANT 89: note = Any amino acid
DXXXXXXXXXXXXXXXXXXXXXXXXXXXXXXXXXXXXXXXXXXXXXEXXXXXXXXXXXXXXXXXXXXXXXXXXXXXXXXXXXXXKXDXXD

SEQ ID NO: 795720 - protein, 88 aa, unidentified
  VARIANT 2: note = Any amino acid
  VARIANT 3: note = Any amino acid
  VARIANT 4: note = Any amino acid
  VARIANT 5: note = Any amino acid
  VARIANT 6: note = Any amino acid
  VARIANT 7: note = Any amino acid
  VARIANT 8: note = Any amino acid
  VARIANT 9: note = Any amino acid
  VARIANT 10: note = Any amino acid
  VARIANT 11: note = Any amino acid
  VARIANT 12: note = Any amino acid
  VARIANT 13: note = Any amino acid
  VARIANT 14: note = Any amino acid
  VARIANT 15: note = Any amino acid
  VARIANT 16: note = Any amino acid
  VARIANT 17: note = Any amino acid
  VARIANT 18: note = Any amino acid
  VARIANT 19: note = Any amino acid
  VARIANT 20: note = Any amino acid
  VARIANT 21: note = Any amino acid
  VARIANT 22: note = Any amino acid
  VARIANT 23: note = Any amino acid
  VARIANT 24: note = Any amino acid
  VARIANT 25: note = Any amino acid
  VARIANT 26: note = Any amino acid
  VARIANT 27: note = Any amino acid
  VARIANT 28: note = Any amino acid
  VARIANT 29: note = Any amino acid
  VARIANT 30: note = Any amino acid
  VARIANT 31: note = Any amino acid
  VARIANT 32: note = Any amino acid
  VARIANT 33: note = Any amino acid
  VARIANT 34: note = Any amino acid
  VARIANT 35: note = Any amino acid
  VARIANT 36: note = Any amino acid
  VARIANT 37: note = Any amino acid
  VARIANT 38: note = Any amino acid
  VARIANT 39: note = Any amino acid
  VARIANT 40: note = Any amino acid
  VARIANT 41: note = Any amino acid
  VARIANT 42: note = Any amino acid
  VARIANT 43: note = Any amino acid
  VARIANT 44: note = Any amino acid
  VARIANT 45: note = Any amino acid
  VARIANT 46: note = Any amino acid
  VARIANT 47: note = Any amino acid
  VARIANT 49: note = Any amino acid
  VARIANT 50: note = Any amino acid
  VARIANT 51: note = Any amino acid
  VARIANT 52: note = Any amino acid
  VARIANT 53: note = Any amino acid
  VARIANT 54: note = Any amino acid
  VARIANT 55: note = Any amino acid
  VARIANT 56: note = Any amino acid
  VARIANT 57: note = Any amino acid
  VARIANT 58: note = Any amino acid
  VARIANT 59: note = Any amino acid
  VARIANT 60: note = Any amino acid
  VARIANT 61: note = Any amino acid
  VARIANT 62: note = Any amino acid
  VARIANT 63: note = Any amino acid
  VARIANT 64: note = Any amino acid
  VARIANT 65: note = Any amino acid
  VARIANT 66: note = Any amino acid
  VARIANT 67: note = Any amino acid
  VARIANT 68: note = Any amino acid
  VARIANT 69: note = Any amino acid
  VARIANT 70: note = Any amino acid
  VARIANT 71: note = Any amino acid
  VARIANT 72: note = Any amino acid
  VARIANT 73: note = Any amino acid
  VARIANT 74: note = Any amino acid
  VARIANT 75: note = Any amino acid
  VARIANT 76: note = Any amino acid
  VARIANT 77: note = Any amino acid
  VARIANT 78: note = Any amino acid
  VARIANT 79: note = Any amino acid
  VARIANT 80: note = Any amino acid
  VARIANT 81: note = Any amino acid
  VARIANT 82: note = Any amino acid
  VARIANT 84: note = Any amino acid
  VARIANT 86: note = Any amino acid
  VARIANT 87: note = Any amino acid
DXXXXXXXXXXXXXXXXXXXXXXXXXXXXXXXXXXXXXXXXXXXXXXEXXXXXXXXXXXXXXXXXXXXXXXXXXXXXXXXXXRXDXXD

SEQ ID NO: 795721 - protein, 104 aa, unidentified
  VARIANT 2: note = Any amino acid
  VARIANT 3: note = Any amino acid
  VARIANT 4: note = Any amino acid
  VARIANT 5: note = Any amino acid
  VARIANT 6: note = Any amino acid
  VARIANT 7: note = Any amino acid
  VARIANT 8: note = Any amino acid
  VARIANT 9: note = Any amino acid
  VARIANT 10: note = Any amino acid
  VARIANT 11: note = Any amino acid
  VARIANT 12: note = Any amino acid
  VARIANT 13: note = Any amino acid
  VARIANT 14: note = Any amino acid
  VARIANT 15: note = Any amino acid
  VARIANT 16: note = Any amino acid
  VARIANT 17: note = Any amino acid
  VARIANT 18: note = Any amino acid
  VARIANT 19: note = Any amino acid
  VARIANT 20: note = Any amino acid
  VARIANT 21: note = Any amino acid
  VARIANT 22: note = Any amino acid
  VARIANT 23: note = Any amino acid
  VARIANT 24: note = Any amino acid
  VARIANT 25: note = Any amino acid
  VARIANT 26: note = Any amino acid
  VARIANT 27: note = Any amino acid
  VARIANT 28: note = Any amino acid
  VARIANT 29: note = Any amino acid
  VARIANT 30: note = Any amino acid
  VARIANT 31: note = Any amino acid
  VARIANT 32: note = Any amino acid
  VARIANT 33: note = Any amino acid
  VARIANT 34: note = Any amino acid
  VARIANT 35: note = Any amino acid
  VARIANT 36: note = Any amino acid
  VARIANT 37: note = Any amino acid
  VARIANT 38: note = Any amino acid
  VARIANT 39: note = Any amino acid
  VARIANT 40: note = Any amino acid
  VARIANT 41: note = Any amino acid
  VARIANT 42: note = Any amino acid
  VARIANT 43: note = Any amino acid
  VARIANT 44: note = Any amino acid
  VARIANT 45: note = Any amino acid
  VARIANT 46: note = Any amino acid
  VARIANT 47: note = Any amino acid
  VARIANT 48: note = Any amino acid
  VARIANT 49: note = Any amino acid
  VARIANT 50: note = Any amino acid
  VARIANT 51: note = Any amino acid
  VARIANT 52: note = Any amino acid
  VARIANT 53: note = Any amino acid
  VARIANT 54: note = Any amino acid
  VARIANT 56: note = Any amino acid
  VARIANT 57: note = Any amino acid
  VARIANT 58: note = Any amino acid
  VARIANT 59: note = Any amino acid
  VARIANT 60: note = Any amino acid
  VARIANT 61: note = Any amino acid
  VARIANT 62: note = Any amino acid
  VARIANT 63: note = Any amino acid
  VARIANT 64: note = Any amino acid
  VARIANT 65: note = Any amino acid
  VARIANT 66: note = Any amino acid
  VARIANT 67: note = Any amino acid
  VARIANT 68: note = Any amino acid
  VARIANT 69: note = Any amino acid
  VARIANT 70: note = Any amino acid
  VARIANT 71: note = Any amino acid
  VARIANT 72: note = Any amino acid
  VARIANT 73: note = Any amino acid
  VARIANT 74: note = Any amino acid
  VARIANT 75: note = Any amino acid
  VARIANT 76: note = Any amino acid
  VARIANT 77: note = Any amino acid
  VARIANT 78: note = Any amino acid
  VARIANT 79: note = Any amino acid
  VARIANT 80: note = Any amino acid
  VARIANT 81: note = Any amino acid
  VARIANT 82: note = Any amino acid
  VARIANT 83: note = Any amino acid
  VARIANT 84: note = Any amino acid
  VARIANT 85: note = Any amino acid
  VARIANT 86: note = Any amino acid
  VARIANT 87: note = Any amino acid
  VARIANT 88: note = Any amino acid
  VARIANT 89: note = Any amino acid
  VARIANT 90: note = Any amino acid
  VARIANT 91: note = Any amino acid
  VARIANT 92: note = Any amino acid
  VARIANT 93: note = Any amino acid
  VARIANT 94: note = Any amino acid
  VARIANT 95: note = Any amino acid
  VARIANT 96: note = Any amino acid
  VARIANT 97: note = Any amino acid
  VARIANT 98: note = Any amino acid
  VARIANT 100: note = Any amino acid
  VARIANT 102: note = Any amino acid
  VARIANT 103: note = Any amino acid
DXXXXXXXXXXXXXXXXXXXXXXXXXXXXXXXXXXXXXXXXXXXXXXXXXXXXXEXXXXXXXXXXXXXXXXXXXXXXXXXXXXXXXXXXXXXXXXXXXIXDXXS

SEQ ID NO: 795722 - protein, 99 aa, unidentified
  VARIANT 2: note = Any amino acid
  VARIANT 3: note = Any amino acid
  VARIANT 4: note = Any amino acid
  VARIANT 5: note = Any amino acid
  VARIANT 6: note = Any amino acid
  VARIANT 7: note = Any amino acid
  VARIANT 8: note = Any amino acid
  VARIANT 9: note = Any amino acid
  VARIANT 10: note = Any amino acid
  VARIANT 11: note = Any amino acid
  VARIANT 12: note = Any amino acid
  VARIANT 13: note = Any amino acid
  VARIANT 14: note = Any amino acid
  VARIANT 15: note = Any amino acid
  VARIANT 16: note = Any amino acid
  VARIANT 17: note = Any amino acid
  VARIANT 18: note = Any amino acid
  VARIANT 19: note = Any amino acid
  VARIANT 20: note = Any amino acid
  VARIANT 21: note = Any amino acid
  VARIANT 22: note = Any amino acid
  VARIANT 23: note = Any amino acid
  VARIANT 24: note = Any amino acid
  VARIANT 25: note = Any amino acid
  VARIANT 26: note = Any amino acid
  VARIANT 27: note = Any amino acid
  VARIANT 28: note = Any amino acid
  VARIANT 29: note = Any amino acid
  VARIANT 30: note = Any amino acid
  VARIANT 31: note = Any amino acid
  VARIANT 32: note = Any amino acid
  VARIANT 33: note = Any amino acid
  VARIANT 34: note = Any amino acid
  VARIANT 35: note = Any amino acid
  VARIANT 36: note = Any amino acid
  VARIANT 37: note = Any amino acid
  VARIANT 38: note = Any amino acid
  VARIANT 39: note = Any amino acid
  VARIANT 40: note = Any amino acid
  VARIANT 41: note = Any amino acid
  VARIANT 42: note = Any amino acid
  VARIANT 43: note = Any amino acid
  VARIANT 44: note = Any amino acid
  VARIANT 45: note = Any amino acid
  VARIANT 46: note = Any amino acid
  VARIANT 47: note = Any amino acid
  VARIANT 48: note = Any amino acid
  VARIANT 49: note = Any amino acid
  VARIANT 50: note = Any amino acid
  VARIANT 51: note = Any amino acid
  VARIANT 52: note = Any amino acid
  VARIANT 53: note = Any amino acid
  VARIANT 54: note = Any amino acid
  VARIANT 56: note = Any amino acid
  VARIANT 57: note = Any amino acid
  VARIANT 58: note = Any amino acid
  VARIANT 59: note = Any amino acid
  VARIANT 60: note = Any amino acid
  VARIANT 61: note = Any amino acid
  VARIANT 62: note = Any amino acid
  VARIANT 63: note = Any amino acid
  VARIANT 64: note = Any amino acid
  VARIANT 65: note = Any amino acid
  VARIANT 66: note = Any amino acid
  VARIANT 67: note = Any amino acid
  VARIANT 68: note = Any amino acid
  VARIANT 69: note = Any amino acid
  VARIANT 70: note = Any amino acid
  VARIANT 71: note = Any amino acid
  VARIANT 72: note = Any amino acid
  VARIANT 73: note = Any amino acid
  VARIANT 74: note = Any amino acid
  VARIANT 75: note = Any amino acid
  VARIANT 76: note = Any amino acid
  VARIANT 77: note = Any amino acid
  VARIANT 78: note = Any amino acid
  VARIANT 79: note = Any amino acid
  VARIANT 80: note = Any amino acid
  VARIANT 81: note = Any amino acid
  VARIANT 82: note = Any amino acid
  VARIANT 83: note = Any amino acid
  VARIANT 84: note = Any amino acid
  VARIANT 85: note = Any amino acid
  VARIANT 86: note = Any amino acid
  VARIANT 87: note = Any amino acid
  VARIANT 88: note = Any amino acid
  VARIANT 89: note = Any amino acid
  VARIANT 90: note = Any amino acid
  VARIANT 91: note = Any amino acid
  VARIANT 92: note = Any amino acid
  VARIANT 93: note = Any amino acid
  VARIANT 95: note = Any amino acid
  VARIANT 97: note = Any amino acid
  VARIANT 98: note = Any amino acid
DXXXXXXXXXXXXXXXXXXXXXXXXXXXXXXXXXXXXXXXXXXXXXXXXXXXXXEXXXXXXXXXXXXXXXXXXXXXXXXXXXXXXXXXXXXXXKXDXXD

SEQ ID NO: 795723 - protein, 108 aa, unidentified
  VARIANT 2: note = Any amino acid
  VARIANT 3: note = Any amino acid
  VARIANT 4: note = Any amino acid
  VARIANT 5: note = Any amino acid
  VARIANT 6: note = Any amino acid
  VARIANT 7: note = Any amino acid
  VARIANT 8: note = Any amino acid
  VARIANT 9: note = Any amino acid
  VARIANT 10: note = Any amino acid
  VARIANT 11: note = Any amino acid
  VARIANT 12: note = Any amino acid
  VARIANT 13: note = Any amino acid
  VARIANT 14: note = Any amino acid
  VARIANT 15: note = Any amino acid
  VARIANT 16: note = Any amino acid
  VARIANT 17: note = Any amino acid
  VARIANT 18: note = Any amino acid
  VARIANT 19: note = Any amino acid
  VARIANT 20: note = Any amino acid
  VARIANT 21: note = Any amino acid
  VARIANT 22: note = Any amino acid
  VARIANT 23: note = Any amino acid
  VARIANT 24: note = Any amino acid
  VARIANT 25: note = Any amino acid
  VARIANT 26: note = Any amino acid
  VARIANT 27: note = Any amino acid
  VARIANT 28: note = Any amino acid
  VARIANT 29: note = Any amino acid
  VARIANT 30: note = Any amino acid
  VARIANT 31: note = Any amino acid
  VARIANT 32: note = Any amino acid
  VARIANT 33: note = Any amino acid
  VARIANT 34: note = Any amino acid
  VARIANT 35: note = Any amino acid
  VARIANT 36: note = Any amino acid
  VARIANT 37: note = Any amino acid
  VARIANT 38: note = Any amino acid
  VARIANT 39: note = Any amino acid
  VARIANT 40: note = Any amino acid
  VARIANT 41: note = Any amino acid
  VARIANT 42: note = Any amino acid
  VARIANT 43: note = Any amino acid
  VARIANT 44: note = Any amino acid
  VARIANT 45: note = Any amino acid
  VARIANT 46: note = Any amino acid
  VARIANT 47: note = Any amino acid
  VARIANT 48: note = Any amino acid
  VARIANT 49: note = Any amino acid
  VARIANT 50: note = Any amino acid
  VARIANT 51: note = Any amino acid
  VARIANT 52: note = Any amino acid
  VARIANT 53: note = Any amino acid
  VARIANT 54: note = Any amino acid
  VARIANT 55: note = Any amino acid
  VARIANT 56: note = Any amino acid
  VARIANT 57: note = Any amino acid
  VARIANT 58: note = Any amino acid
  VARIANT 59: note = Any amino acid
  VARIANT 60: note = Any amino acid
  VARIANT 62: note = Any amino acid
  VARIANT 63: note = Any amino acid
  VARIANT 64: note = Any amino acid
  VARIANT 65: note = Any amino acid
  VARIANT 66: note = Any amino acid
  VARIANT 67: note = Any amino acid
  VARIANT 68: note = Any amino acid
  VARIANT 69: note = Any amino acid
  VARIANT 70: note = Any amino acid
  VARIANT 71: note = Any amino acid
  VARIANT 72: note = Any amino acid
  VARIANT 73: note = Any amino acid
  VARIANT 74: note = Any amino acid
  VARIANT 75: note = Any amino acid
  VARIANT 76: note = Any amino acid
  VARIANT 77: note = Any amino acid
  VARIANT 78: note = Any amino acid
  VARIANT 79: note = Any amino acid
  VARIANT 80: note = Any amino acid
  VARIANT 81: note = Any amino acid
  VARIANT 82: note = Any amino acid
  VARIANT 83: note = Any amino acid
  VARIANT 84: note = Any amino acid
  VARIANT 85: note = Any amino acid
  VARIANT 86: note = Any amino acid
  VARIANT 87: note = Any amino acid
  VARIANT 88: note = Any amino acid
  VARIANT 89: note = Any amino acid
  VARIANT 90: note = Any amino acid
  VARIANT 91: note = Any amino acid
  VARIANT 92: note = Any amino acid
  VARIANT 93: note = Any amino acid
  VARIANT 94: note = Any amino acid
  VARIANT 95: note = Any amino acid
  VARIANT 96: note = Any amino acid
  VARIANT 97: note = Any amino acid
  VARIANT 98: note = Any amino acid
  VARIANT 99: note = Any amino acid
  VARIANT 100: note = Any amino acid
  VARIANT 101: note = Any amino acid
  VARIANT 102: note = Any amino acid
  VARIANT 104: note = Any amino acid
  VARIANT 106: note = Any amino acid
  VARIANT 107: note = Any amino acid
DXXXXXXXXXXXXXXXXXXXXXXXXXXXXXXXXXXXXXXXXXXXXXXXXXXXXXXXXXXXDXXXXXXXXXXXXXXXXXXXXXXXXXXXXXXXXXXXXXXXXXKXDXXD

SEQ ID NO: 795724 - protein, 92 aa, unidentified
  VARIANT 2: note = Any amino acid
  VARIANT 3: note = Any amino acid
  VARIANT 4: note = Any amino acid
  VARIANT 5: note = Any amino acid
  VARIANT 6: note = Any amino acid
  VARIANT 7: note = Any amino acid
  VARIANT 8: note = Any amino acid
  VARIANT 9: note = Any amino acid
  VARIANT 10: note = Any amino acid
  VARIANT 11: note = Any amino acid
  VARIANT 12: note = Any amino acid
  VARIANT 13: note = Any amino acid
  VARIANT 14: note = Any amino acid
  VARIANT 15: note = Any amino acid
  VARIANT 16: note = Any amino acid
  VARIANT 17: note = Any amino acid
  VARIANT 18: note = Any amino acid
  VARIANT 19: note = Any amino acid
  VARIANT 20: note = Any amino acid
  VARIANT 21: note = Any amino acid
  VARIANT 22: note = Any amino acid
  VARIANT 23: note = Any amino acid
  VARIANT 24: note = Any amino acid
  VARIANT 25: note = Any amino acid
  VARIANT 26: note = Any amino acid
  VARIANT 27: note = Any amino acid
  VARIANT 28: note = Any amino acid
  VARIANT 29: note = Any amino acid
  VARIANT 30: note = Any amino acid
  VARIANT 31: note = Any amino acid
  VARIANT 32: note = Any amino acid
  VARIANT 33: note = Any amino acid
  VARIANT 34: note = Any amino acid
  VARIANT 35: note = Any amino acid
  VARIANT 36: note = Any amino acid
  VARIANT 37: note = Any amino acid
  VARIANT 38: note = Any amino acid
  VARIANT 39: note = Any amino acid
  VARIANT 40: note = Any amino acid
  VARIANT 41: note = Any amino acid
  VARIANT 42: note = Any amino acid
  VARIANT 43: note = Any amino acid
  VARIANT 44: note = Any amino acid
  VARIANT 45: note = Any amino acid
  VARIANT 47: note = Any amino acid
  VARIANT 48: note = Any amino acid
  VARIANT 49: note = Any amino acid
  VARIANT 50: note = Any amino acid
  VARIANT 51: note = Any amino acid
  VARIANT 52: note = Any amino acid
  VARIANT 53: note = Any amino acid
  VARIANT 54: note = Any amino acid
  VARIANT 55: note = Any amino acid
  VARIANT 56: note = Any amino acid
  VARIANT 57: note = Any amino acid
  VARIANT 58: note = Any amino acid
  VARIANT 59: note = Any amino acid
  VARIANT 60: note = Any amino acid
  VARIANT 61: note = Any amino acid
  VARIANT 62: note = Any amino acid
  VARIANT 63: note = Any amino acid
  VARIANT 64: note = Any amino acid
  VARIANT 65: note = Any amino acid
  VARIANT 66: note = Any amino acid
  VARIANT 67: note = Any amino acid
  VARIANT 68: note = Any amino acid
  VARIANT 69: note = Any amino acid
  VARIANT 70: note = Any amino acid
  VARIANT 71: note = Any amino acid
  VARIANT 72: note = Any amino acid
  VARIANT 73: note = Any amino acid
  VARIANT 74: note = Any amino acid
  VARIANT 75: note = Any amino acid
  VARIANT 76: note = Any amino acid
  VARIANT 77: note = Any amino acid
  VARIANT 78: note = Any amino acid
  VARIANT 79: note = Any amino acid
  VARIANT 80: note = Any amino acid
  VARIANT 81: note = Any amino acid
  VARIANT 82: note = Any amino acid
  VARIANT 83: note = Any amino acid
  VARIANT 84: note = Any amino acid
  VARIANT 85: note = Any amino acid
  VARIANT 86: note = Any amino acid
  VARIANT 88: note = Any amino acid
  VARIANT 90: note = Any amino acid
  VARIANT 91: note = Any amino acid
DXXXXXXXXXXXXXXXXXXXXXXXXXXXXXXXXXXXXXXXXXXXXEXXXXXXXXXXXXXXXXXXXXXXXXXXXXXXXXXXXXXXXXKXDXXD

SEQ ID NO: 795725 - protein, 98 aa, unidentified
  VARIANT 2: note = Any amino acid
  VARIANT 3: note = Any amino acid
  VARIANT 4: note = Any amino acid
  VARIANT 5: note = Any amino acid
  VARIANT 6: note = Any amino acid
  VARIANT 7: note = Any amino acid
  VARIANT 8: note = Any amino acid
  VARIANT 9: note = Any amino acid
  VARIANT 10: note = Any amino acid
  VARIANT 11: note = Any amino acid
  VARIANT 12: note = Any amino acid
  VARIANT 13: note = Any amino acid
  VARIANT 14: note = Any amino acid
  VARIANT 15: note = Any amino acid
  VARIANT 16: note = Any amino acid
  VARIANT 17: note = Any amino acid
  VARIANT 18: note = Any amino acid
  VARIANT 19: note = Any amino acid
  VARIANT 20: note = Any amino acid
  VARIANT 21: note = Any amino acid
  VARIANT 22: note = Any amino acid
  VARIANT 23: note = Any amino acid
  VARIANT 24: note = Any amino acid
  VARIANT 25: note = Any amino acid
  VARIANT 26: note = Any amino acid
  VARIANT 27: note = Any amino acid
  VARIANT 28: note = Any amino acid
  VARIANT 29: note = Any amino acid
  VARIANT 30: note = Any amino acid
  VARIANT 31: note = Any amino acid
  VARIANT 32: note = Any amino acid
  VARIANT 33: note = Any amino acid
  VARIANT 34: note = Any amino acid
  VARIANT 35: note = Any amino acid
  VARIANT 36: note = Any amino acid
  VARIANT 37: note = Any amino acid
  VARIANT 38: note = Any amino acid
  VARIANT 39: note = Any amino acid
  VARIANT 40: note = Any amino acid
  VARIANT 41: note = Any amino acid
  VARIANT 42: note = Any amino acid
  VARIANT 43: note = Any amino acid
  VARIANT 44: note = Any amino acid
  VARIANT 45: note = Any amino acid
  VARIANT 46: note = Any amino acid
  VARIANT 47: note = Any amino acid
  VARIANT 48: note = Any amino acid
  VARIANT 49: note = Any amino acid
  VARIANT 50: note = Any amino acid
  VARIANT 51: note = Any amino acid
  VARIANT 52: note = Any amino acid
  VARIANT 54: note = Any amino acid
  VARIANT 55: note = Any amino acid
  VARIANT 56: note = Any amino acid
  VARIANT 57: note = Any amino acid
  VARIANT 58: note = Any amino acid
  VARIANT 59: note = Any amino acid
  VARIANT 60: note = Any amino acid
  VARIANT 61: note = Any amino acid
  VARIANT 62: note = Any amino acid
  VARIANT 63: note = Any amino acid
  VARIANT 64: note = Any amino acid
  VARIANT 65: note = Any amino acid
  VARIANT 66: note = Any amino acid
  VARIANT 67: note = Any amino acid
  VARIANT 68: note = Any amino acid
  VARIANT 69: note = Any amino acid
  VARIANT 70: note = Any amino acid
  VARIANT 71: note = Any amino acid
  VARIANT 72: note = Any amino acid
  VARIANT 73: note = Any amino acid
  VARIANT 74: note = Any amino acid
  VARIANT 75: note = Any amino acid
  VARIANT 76: note = Any amino acid
  VARIANT 77: note = Any amino acid
  VARIANT 78: note = Any amino acid
  VARIANT 79: note = Any amino acid
  VARIANT 80: note = Any amino acid
  VARIANT 81: note = Any amino acid
  VARIANT 82: note = Any amino acid
  VARIANT 83: note = Any amino acid
  VARIANT 84: note = Any amino acid
  VARIANT 85: note = Any amino acid
  VARIANT 86: note = Any amino acid
  VARIANT 87: note = Any amino acid
  VARIANT 88: note = Any amino acid
  VARIANT 89: note = Any amino acid
  VARIANT 90: note = Any amino acid
  VARIANT 91: note = Any amino acid
  VARIANT 92: note = Any amino acid
  VARIANT 94: note = Any amino acid
  VARIANT 96: note = Any amino acid
  VARIANT 97: note = Any amino acid
DXXXXXXXXXXXXXXXXXXXXXXXXXXXXXXXXXXXXXXXXXXXXXXXXXXXGXXXXXXXXXXXXXXXXXXXXXXXXXXXXXXXXXXXXXXXKXDXXD

SEQ ID NO: 795726 - protein, 96 aa, unidentified
  VARIANT 2: note = Any amino acid
  VARIANT 3: note = Any amino acid
  VARIANT 4: note = Any amino acid
  VARIANT 5: note = Any amino acid
  VARIANT 6: note = Any amino acid
  VARIANT 7: note = Any amino acid
  VARIANT 8: note = Any amino acid
  VARIANT 9: note = Any amino acid
  VARIANT 10: note = Any amino acid
  VARIANT 11: note = Any amino acid
  VARIANT 12: note = Any amino acid
  VARIANT 13: note = Any amino acid
  VARIANT 14: note = Any amino acid
  VARIANT 15: note = Any amino acid
  VARIANT 16: note = Any amino acid
  VARIANT 17: note = Any amino acid
  VARIANT 18: note = Any amino acid
  VARIANT 19: note = Any amino acid
  VARIANT 20: note = Any amino acid
  VARIANT 21: note = Any amino acid
  VARIANT 22: note = Any amino acid
  VARIANT 23: note = Any amino acid
  VARIANT 24: note = Any amino acid
  VARIANT 25: note = Any amino acid
  VARIANT 26: note = Any amino acid
  VARIANT 27: note = Any amino acid
  VARIANT 28: note = Any amino acid
  VARIANT 29: note = Any amino acid
  VARIANT 30: note = Any amino acid
  VARIANT 31: note = Any amino acid
  VARIANT 32: note = Any amino acid
  VARIANT 33: note = Any amino acid
  VARIANT 34: note = Any amino acid
  VARIANT 35: note = Any amino acid
  VARIANT 36: note = Any amino acid
  VARIANT 37: note = Any amino acid
  VARIANT 38: note = Any amino acid
  VARIANT 39: note = Any amino acid
  VARIANT 40: note = Any amino acid
  VARIANT 41: note = Any amino acid
  VARIANT 42: note = Any amino acid
  VARIANT 43: note = Any amino acid
  VARIANT 44: note = Any amino acid
  VARIANT 45: note = Any amino acid
  VARIANT 46: note = Any amino acid
  VARIANT 47: note = Any amino acid
  VARIANT 48: note = Any amino acid
  VARIANT 50: note = Any amino acid
  VARIANT 51: note = Any amino acid
  VARIANT 52: note = Any amino acid
  VARIANT 53: note = Any amino acid
  VARIANT 54: note = Any amino acid
  VARIANT 55: note = Any amino acid
  VARIANT 56: note = Any amino acid
  VARIANT 57: note = Any amino acid
  VARIANT 58: note = Any amino acid
  VARIANT 59: note = Any amino acid
  VARIANT 60: note = Any amino acid
  VARIANT 61: note = Any amino acid
  VARIANT 62: note = Any amino acid
  VARIANT 63: note = Any amino acid
  VARIANT 64: note = Any amino acid
  VARIANT 65: note = Any amino acid
  VARIANT 66: note = Any amino acid
  VARIANT 67: note = Any amino acid
  VARIANT 68: note = Any amino acid
  VARIANT 69: note = Any amino acid
  VARIANT 70: note = Any amino acid
  VARIANT 71: note = Any amino acid
  VARIANT 72: note = Any amino acid
  VARIANT 73: note = Any amino acid
  VARIANT 74: note = Any amino acid
  VARIANT 75: note = Any amino acid
  VARIANT 76: note = Any amino acid
  VARIANT 77: note = Any amino acid
  VARIANT 78: note = Any amino acid
  VARIANT 79: note = Any amino acid
  VARIANT 80: note = Any amino acid
  VARIANT 81: note = Any amino acid
  VARIANT 82: note = Any amino acid
  VARIANT 83: note = Any amino acid
  VARIANT 84: note = Any amino acid
  VARIANT 85: note = Any amino acid
  VARIANT 86: note = Any amino acid
  VARIANT 87: note = Any amino acid
  VARIANT 88: note = Any amino acid
  VARIANT 89: note = Any amino acid
  VARIANT 90: note = Any amino acid
  VARIANT 92: note = Any amino acid
  VARIANT 94: note = Any amino acid
  VARIANT 95: note = Any amino acid
DXXXXXXXXXXXXXXXXXXXXXXXXXXXXXXXXXXXXXXXXXXXXXXXEXXXXXXXXXXXXXXXXXXXXXXXXXXXXXXXXXXXXXXXXXKXDXXD

SEQ ID NO: 795727 - protein, 105 aa, unidentified
  VARIANT 2: note = Any amino acid
  VARIANT 3: note = Any amino acid
  VARIANT 4: note = Any amino acid
  VARIANT 5: note = Any amino acid
  VARIANT 6: note = Any amino acid
  VARIANT 7: note = Any amino acid
  VARIANT 8: note = Any amino acid
  VARIANT 9: note = Any amino acid
  VARIANT 10: note = Any amino acid
  VARIANT 11: note = Any amino acid
  VARIANT 12: note = Any amino acid
  VARIANT 13: note = Any amino acid
  VARIANT 14: note = Any amino acid
  VARIANT 15: note = Any amino acid
  VARIANT 16: note = Any amino acid
  VARIANT 17: note = Any amino acid
  VARIANT 18: note = Any amino acid
  VARIANT 19: note = Any amino acid
  VARIANT 20: note = Any amino acid
  VARIANT 21: note = Any amino acid
  VARIANT 22: note = Any amino acid
  VARIANT 23: note = Any amino acid
  VARIANT 24: note = Any amino acid
  VARIANT 25: note = Any amino acid
  VARIANT 26: note = Any amino acid
  VARIANT 27: note = Any amino acid
  VARIANT 28: note = Any amino acid
  VARIANT 29: note = Any amino acid
  VARIANT 30: note = Any amino acid
  VARIANT 31: note = Any amino acid
  VARIANT 32: note = Any amino acid
  VARIANT 33: note = Any amino acid
  VARIANT 34: note = Any amino acid
  VARIANT 35: note = Any amino acid
  VARIANT 36: note = Any amino acid
  VARIANT 37: note = Any amino acid
  VARIANT 38: note = Any amino acid
  VARIANT 39: note = Any amino acid
  VARIANT 40: note = Any amino acid
  VARIANT 41: note = Any amino acid
  VARIANT 42: note = Any amino acid
  VARIANT 43: note = Any amino acid
  VARIANT 44: note = Any amino acid
  VARIANT 45: note = Any amino acid
  VARIANT 46: note = Any amino acid
  VARIANT 47: note = Any amino acid
  VARIANT 48: note = Any amino acid
  VARIANT 49: note = Any amino acid
  VARIANT 50: note = Any amino acid
  VARIANT 51: note = Any amino acid
  VARIANT 52: note = Any amino acid
  VARIANT 53: note = Any amino acid
  VARIANT 54: note = Any amino acid
  VARIANT 55: note = Any amino acid
  VARIANT 57: note = Any amino acid
  VARIANT 58: note = Any amino acid
  VARIANT 59: note = Any amino acid
  VARIANT 60: note = Any amino acid
  VARIANT 61: note = Any amino acid
  VARIANT 62: note = Any amino acid
  VARIANT 63: note = Any amino acid
  VARIANT 64: note = Any amino acid
  VARIANT 65: note = Any amino acid
  VARIANT 66: note = Any amino acid
  VARIANT 67: note = Any amino acid
  VARIANT 68: note = Any amino acid
  VARIANT 69: note = Any amino acid
  VARIANT 70: note = Any amino acid
  VARIANT 71: note = Any amino acid
  VARIANT 72: note = Any amino acid
  VARIANT 73: note = Any amino acid
  VARIANT 74: note = Any amino acid
  VARIANT 75: note = Any amino acid
  VARIANT 76: note = Any amino acid
  VARIANT 77: note = Any amino acid
  VARIANT 78: note = Any amino acid
  VARIANT 79: note = Any amino acid
  VARIANT 80: note = Any amino acid
  VARIANT 81: note = Any amino acid
  VARIANT 82: note = Any amino acid
  VARIANT 83: note = Any amino acid
  VARIANT 84: note = Any amino acid
  VARIANT 85: note = Any amino acid
  VARIANT 86: note = Any amino acid
  VARIANT 87: note = Any amino acid
  VARIANT 88: note = Any amino acid
  VARIANT 89: note = Any amino acid
  VARIANT 90: note = Any amino acid
  VARIANT 91: note = Any amino acid
  VARIANT 92: note = Any amino acid
  VARIANT 93: note = Any amino acid
  VARIANT 94: note = Any amino acid
  VARIANT 95: note = Any amino acid
  VARIANT 96: note = Any amino acid
  VARIANT 97: note = Any amino acid
  VARIANT 98: note = Any amino acid
  VARIANT 99: note = Any amino acid
  VARIANT 101: note = Any amino acid
  VARIANT 103: note = Any amino acid
  VARIANT 104: note = Any amino acid
DXXXXXXXXXXXXXXXXXXXXXXXXXXXXXXXXXXXXXXXXXXXXXXXXXXXXXXEXXXXXXXXXXXXXXXXXXXXXXXXXXXXXXXXXXXXXXXXXXXKXDXXS

SEQ ID NO: 795728 - protein, 107 aa, unidentified
  VARIANT 2: note = Any amino acid
  VARIANT 3: note = Any amino acid
  VARIANT 4: note = Any amino acid
  VARIANT 5: note = Any amino acid
  VARIANT 6: note = Any amino acid
  VARIANT 7: note = Any amino acid
  VARIANT 8: note = Any amino acid
  VARIANT 9: note = Any amino acid
  VARIANT 10: note = Any amino acid
  VARIANT 11: note = Any amino acid
  VARIANT 12: note = Any amino acid
  VARIANT 13: note = Any amino acid
  VARIANT 14: note = Any amino acid
  VARIANT 15: note = Any amino acid
  VARIANT 16: note = Any amino acid
  VARIANT 17: note = Any amino acid
  VARIANT 18: note = Any amino acid
  VARIANT 19: note = Any amino acid
  VARIANT 20: note = Any amino acid
  VARIANT 21: note = Any amino acid
  VARIANT 22: note = Any amino acid
  VARIANT 23: note = Any amino acid
  VARIANT 24: note = Any amino acid
  VARIANT 25: note = Any amino acid
  VARIANT 26: note = Any amino acid
  VARIANT 27: note = Any amino acid
  VARIANT 28: note = Any amino acid
  VARIANT 29: note = Any amino acid
  VARIANT 30: note = Any amino acid
  VARIANT 31: note = Any amino acid
  VARIANT 32: note = Any amino acid
  VARIANT 33: note = Any amino acid
  VARIANT 34: note = Any amino acid
  VARIANT 35: note = Any amino acid
  VARIANT 36: note = Any amino acid
  VARIANT 37: note = Any amino acid
  VARIANT 38: note = Any amino acid
  VARIANT 39: note = Any amino acid
  VARIANT 40: note = Any amino acid
  VARIANT 41: note = Any amino acid
  VARIANT 42: note = Any amino acid
  VARIANT 43: note = Any amino acid
  VARIANT 44: note = Any amino acid
  VARIANT 45: note = Any amino acid
  VARIANT 46: note = Any amino acid
  VARIANT 47: note = Any amino acid
  VARIANT 48: note = Any amino acid
  VARIANT 49: note = Any amino acid
  VARIANT 50: note = Any amino acid
  VARIANT 51: note = Any amino acid
  VARIANT 52: note = Any amino acid
  VARIANT 53: note = Any amino acid
  VARIANT 54: note = Any amino acid
  VARIANT 55: note = Any amino acid
  VARIANT 57: note = Any amino acid
  VARIANT 58: note = Any amino acid
  VARIANT 59: note = Any amino acid
  VARIANT 60: note = Any amino acid
  VARIANT 61: note = Any amino acid
  VARIANT 62: note = Any amino acid
  VARIANT 63: note = Any amino acid
  VARIANT 64: note = Any amino acid
  VARIANT 65: note = Any amino acid
  VARIANT 66: note = Any amino acid
  VARIANT 67: note = Any amino acid
  VARIANT 68: note = Any amino acid
  VARIANT 69: note = Any amino acid
  VARIANT 70: note = Any amino acid
  VARIANT 71: note = Any amino acid
  VARIANT 72: note = Any amino acid
  VARIANT 73: note = Any amino acid
  VARIANT 74: note = Any amino acid
  VARIANT 75: note = Any amino acid
  VARIANT 76: note = Any amino acid
  VARIANT 77: note = Any amino acid
  VARIANT 78: note = Any amino acid
  VARIANT 79: note = Any amino acid
  VARIANT 80: note = Any amino acid
  VARIANT 81: note = Any amino acid
  VARIANT 82: note = Any amino acid
  VARIANT 83: note = Any amino acid
  VARIANT 84: note = Any amino acid
  VARIANT 85: note = Any amino acid
  VARIANT 86: note = Any amino acid
  VARIANT 87: note = Any amino acid
  VARIANT 88: note = Any amino acid
  VARIANT 89: note = Any amino acid
  VARIANT 90: note = Any amino acid
  VARIANT 91: note = Any amino acid
  VARIANT 92: note = Any amino acid
  VARIANT 93: note = Any amino acid
  VARIANT 94: note = Any amino acid
  VARIANT 95: note = Any amino acid
  VARIANT 96: note = Any amino acid
  VARIANT 97: note = Any amino acid
  VARIANT 98: note = Any amino acid
  VARIANT 99: note = Any amino acid
  VARIANT 100: note = Any amino acid
  VARIANT 101: note = Any amino acid
  VARIANT 103: note = Any amino acid
  VARIANT 105: note = Any amino acid
  VARIANT 106: note = Any amino acid
DXXXXXXXXXXXXXXXXXXXXXXXXXXXXXXXXXXXXXXXXXXXXXXXXXXXXXXEXXXXXXXXXXXXXXXXXXXXXXXXXXXXXXXXXXXXXXXXXXXXXHXDXXD

SEQ ID NO: 795729 - protein, 98 aa, unidentified
  VARIANT 2: note = Any amino acid
  VARIANT 3: note = Any amino acid
  VARIANT 4: note = Any amino acid
  VARIANT 5: note = Any amino acid
  VARIANT 6: note = Any amino acid
  VARIANT 7: note = Any amino acid
  VARIANT 8: note = Any amino acid
  VARIANT 9: note = Any amino acid
  VARIANT 10: note = Any amino acid
  VARIANT 11: note = Any amino acid
  VARIANT 12: note = Any amino acid
  VARIANT 13: note = Any amino acid
  VARIANT 14: note = Any amino acid
  VARIANT 15: note = Any amino acid
  VARIANT 16: note = Any amino acid
  VARIANT 17: note = Any amino acid
  VARIANT 18: note = Any amino acid
  VARIANT 19: note = Any amino acid
  VARIANT 20: note = Any amino acid
  VARIANT 21: note = Any amino acid
  VARIANT 22: note = Any amino acid
  VARIANT 23: note = Any amino acid
  VARIANT 24: note = Any amino acid
  VARIANT 25: note = Any amino acid
  VARIANT 26: note = Any amino acid
  VARIANT 27: note = Any amino acid
  VARIANT 28: note = Any amino acid
  VARIANT 29: note = Any amino acid
  VARIANT 30: note = Any amino acid
  VARIANT 31: note = Any amino acid
  VARIANT 32: note = Any amino acid
  VARIANT 33: note = Any amino acid
  VARIANT 34: note = Any amino acid
  VARIANT 35: note = Any amino acid
  VARIANT 36: note = Any amino acid
  VARIANT 37: note = Any amino acid
  VARIANT 38: note = Any amino acid
  VARIANT 39: note = Any amino acid
  VARIANT 40: note = Any amino acid
  VARIANT 41: note = Any amino acid
  VARIANT 42: note = Any amino acid
  VARIANT 43: note = Any amino acid
  VARIANT 44: note = Any amino acid
  VARIANT 45: note = Any amino acid
  VARIANT 46: note = Any amino acid
  VARIANT 47: note = Any amino acid
  VARIANT 48: note = Any amino acid
  VARIANT 49: note = Any amino acid
  VARIANT 50: note = Any amino acid
  VARIANT 51: note = Any amino acid
  VARIANT 53: note = Any amino acid
  VARIANT 54: note = Any amino acid
  VARIANT 55: note = Any amino acid
  VARIANT 56: note = Any amino acid
  VARIANT 57: note = Any amino acid
  VARIANT 58: note = Any amino acid
  VARIANT 59: note = Any amino acid
  VARIANT 60: note = Any amino acid
  VARIANT 61: note = Any amino acid
  VARIANT 62: note = Any amino acid
  VARIANT 63: note = Any amino acid
  VARIANT 64: note = Any amino acid
  VARIANT 65: note = Any amino acid
  VARIANT 66: note = Any amino acid
  VARIANT 67: note = Any amino acid
  VARIANT 68: note = Any amino acid
  VARIANT 69: note = Any amino acid
  VARIANT 70: note = Any amino acid
  VARIANT 71: note = Any amino acid
  VARIANT 72: note = Any amino acid
  VARIANT 73: note = Any amino acid
  VARIANT 74: note = Any amino acid
  VARIANT 75: note = Any amino acid
  VARIANT 76: note = Any amino acid
  VARIANT 77: note = Any amino acid
  VARIANT 78: note = Any amino acid
  VARIANT 79: note = Any amino acid
  VARIANT 80: note = Any amino acid
  VARIANT 81: note = Any amino acid
  VARIANT 82: note = Any amino acid
  VARIANT 83: note = Any amino acid
  VARIANT 84: note = Any amino acid
  VARIANT 85: note = Any amino acid
  VARIANT 86: note = Any amino acid
  VARIANT 87: note = Any amino acid
  VARIANT 88: note = Any amino acid
  VARIANT 89: note = Any amino acid
  VARIANT 90: note = Any amino acid
  VARIANT 91: note = Any amino acid
  VARIANT 92: note = Any amino acid
  VARIANT 94: note = Any amino acid
  VARIANT 96: note = Any amino acid
  VARIANT 97: note = Any amino acid
DXXXXXXXXXXXXXXXXXXXXXXXXXXXXXXXXXXXXXXXXXXXXXXXXXXCXXXXXXXXXXXXXXXXXXXXXXXXXXXXXXXXXXXXXXXXKXDXXD

SEQ ID NO: 795730 - protein, 103 aa, unidentified
  VARIANT 2: note = Any amino acid
  VARIANT 3: note = Any amino acid
  VARIANT 4: note = Any amino acid
  VARIANT 5: note = Any amino acid
  VARIANT 6: note = Any amino acid
  VARIANT 7: note = Any amino acid
  VARIANT 8: note = Any amino acid
  VARIANT 9: note = Any amino acid
  VARIANT 10: note = Any amino acid
  VARIANT 11: note = Any amino acid
  VARIANT 12: note = Any amino acid
  VARIANT 13: note = Any amino acid
  VARIANT 14: note = Any amino acid
  VARIANT 15: note = Any amino acid
  VARIANT 16: note = Any amino acid
  VARIANT 17: note = Any amino acid
  VARIANT 18: note = Any amino acid
  VARIANT 19: note = Any amino acid
  VARIANT 20: note = Any amino acid
  VARIANT 21: note = Any amino acid
  VARIANT 22: note = Any amino acid
  VARIANT 23: note = Any amino acid
  VARIANT 24: note = Any amino acid
  VARIANT 25: note = Any amino acid
  VARIANT 26: note = Any amino acid
  VARIANT 27: note = Any amino acid
  VARIANT 28: note = Any amino acid
  VARIANT 29: note = Any amino acid
  VARIANT 30: note = Any amino acid
  VARIANT 31: note = Any amino acid
  VARIANT 32: note = Any amino acid
  VARIANT 33: note = Any amino acid
  VARIANT 34: note = Any amino acid
  VARIANT 35: note = Any amino acid
  VARIANT 36: note = Any amino acid
  VARIANT 37: note = Any amino acid
  VARIANT 38: note = Any amino acid
  VARIANT 39: note = Any amino acid
  VARIANT 40: note = Any amino acid
  VARIANT 41: note = Any amino acid
  VARIANT 42: note = Any amino acid
  VARIANT 43: note = Any amino acid
  VARIANT 44: note = Any amino acid
  VARIANT 45: note = Any amino acid
  VARIANT 46: note = Any amino acid
  VARIANT 47: note = Any amino acid
  VARIANT 48: note = Any amino acid
  VARIANT 49: note = Any amino acid
  VARIANT 50: note = Any amino acid
  VARIANT 51: note = Any amino acid
  VARIANT 52: note = Any amino acid
  VARIANT 53: note = Any amino acid
  VARIANT 54: note = Any amino acid
  VARIANT 55: note = Any amino acid
  VARIANT 56: note = Any amino acid
  VARIANT 57: note = Any amino acid
  VARIANT 58: note = Any amino acid
  VARIANT 59: note = Any amino acid
  VARIANT 61: note = Any amino acid
  VARIANT 62: note = Any amino acid
  VARIANT 63: note = Any amino acid
  VARIANT 64: note = Any amino acid
  VARIANT 65: note = Any amino acid
  VARIANT 66: note = Any amino acid
  VARIANT 67: note = Any amino acid
  VARIANT 68: note = Any amino acid
  VARIANT 69: note = Any amino acid
  VARIANT 70: note = Any amino acid
  VARIANT 71: note = Any amino acid
  VARIANT 72: note = Any amino acid
  VARIANT 73: note = Any amino acid
  VARIANT 74: note = Any amino acid
  VARIANT 75: note = Any amino acid
  VARIANT 76: note = Any amino acid
  VARIANT 77: note = Any amino acid
  VARIANT 78: note = Any amino acid
  VARIANT 79: note = Any amino acid
  VARIANT 80: note = Any amino acid
  VARIANT 81: note = Any amino acid
  VARIANT 82: note = Any amino acid
  VARIANT 83: note = Any amino acid
  VARIANT 84: note = Any amino acid
  VARIANT 85: note = Any amino acid
  VARIANT 86: note = Any amino acid
  VARIANT 87: note = Any amino acid
  VARIANT 88: note = Any amino acid
  VARIANT 89: note = Any amino acid
  VARIANT 90: note = Any amino acid
  VARIANT 91: note = Any amino acid
  VARIANT 92: note = Any amino acid
  VARIANT 93: note = Any amino acid
  VARIANT 94: note = Any amino acid
  VARIANT 95: note = Any amino acid
  VARIANT 96: note = Any amino acid
  VARIANT 97: note = Any amino acid
  VARIANT 99: note = Any amino acid
  VARIANT 101: note = Any amino acid
  VARIANT 102: note = Any amino acid
DXXXXXXXXXXXXXXXXXXXXXXXXXXXXXXXXXXXXXXXXXXXXXXXXXXXXXXXXXXEXXXXXXXXXXXXXXXXXXXXXXXXXXXXXXXXXXXXXKXDXXD

SEQ ID NO: 795731 - protein, 91 aa, unidentified
  VARIANT 2: note = Any amino acid
  VARIANT 3: note = Any amino acid
  VARIANT 4: note = Any amino acid
  VARIANT 5: note = Any amino acid
  VARIANT 6: note = Any amino acid
  VARIANT 7: note = Any amino acid
  VARIANT 8: note = Any amino acid
  VARIANT 9: note = Any amino acid
  VARIANT 10: note = Any amino acid
  VARIANT 11: note = Any amino acid
  VARIANT 12: note = Any amino acid
  VARIANT 13: note = Any amino acid
  VARIANT 14: note = Any amino acid
  VARIANT 15: note = Any amino acid
  VARIANT 16: note = Any amino acid
  VARIANT 17: note = Any amino acid
  VARIANT 18: note = Any amino acid
  VARIANT 19: note = Any amino acid
  VARIANT 20: note = Any amino acid
  VARIANT 21: note = Any amino acid
  VARIANT 22: note = Any amino acid
  VARIANT 23: note = Any amino acid
  VARIANT 24: note = Any amino acid
  VARIANT 25: note = Any amino acid
  VARIANT 26: note = Any amino acid
  VARIANT 27: note = Any amino acid
  VARIANT 28: note = Any amino acid
  VARIANT 29: note = Any amino acid
  VARIANT 30: note = Any amino acid
  VARIANT 31: note = Any amino acid
  VARIANT 32: note = Any amino acid
  VARIANT 33: note = Any amino acid
  VARIANT 34: note = Any amino acid
  VARIANT 35: note = Any amino acid
  VARIANT 36: note = Any amino acid
  VARIANT 37: note = Any amino acid
  VARIANT 38: note = Any amino acid
  VARIANT 39: note = Any amino acid
  VARIANT 40: note = Any amino acid
  VARIANT 41: note = Any amino acid
  VARIANT 42: note = Any amino acid
  VARIANT 43: note = Any amino acid
  VARIANT 44: note = Any amino acid
  VARIANT 45: note = Any amino acid
  VARIANT 46: note = Any amino acid
  VARIANT 48: note = Any amino acid
  VARIANT 49: note = Any amino acid
  VARIANT 50: note = Any amino acid
  VARIANT 51: note = Any amino acid
  VARIANT 52: note = Any amino acid
  VARIANT 53: note = Any amino acid
  VARIANT 54: note = Any amino acid
  VARIANT 55: note = Any amino acid
  VARIANT 56: note = Any amino acid
  VARIANT 57: note = Any amino acid
  VARIANT 58: note = Any amino acid
  VARIANT 59: note = Any amino acid
  VARIANT 60: note = Any amino acid
  VARIANT 61: note = Any amino acid
  VARIANT 62: note = Any amino acid
  VARIANT 63: note = Any amino acid
  VARIANT 64: note = Any amino acid
  VARIANT 65: note = Any amino acid
  VARIANT 66: note = Any amino acid
  VARIANT 67: note = Any amino acid
  VARIANT 68: note = Any amino acid
  VARIANT 69: note = Any amino acid
  VARIANT 70: note = Any amino acid
  VARIANT 71: note = Any amino acid
  VARIANT 72: note = Any amino acid
  VARIANT 73: note = Any amino acid
  VARIANT 74: note = Any amino acid
  VARIANT 75: note = Any amino acid
  VARIANT 76: note = Any amino acid
  VARIANT 77: note = Any amino acid
  VARIANT 78: note = Any amino acid
  VARIANT 79: note = Any amino acid
  VARIANT 80: note = Any amino acid
  VARIANT 81: note = Any amino acid
  VARIANT 82: note = Any amino acid
  VARIANT 83: note = Any amino acid
  VARIANT 84: note = Any amino acid
  VARIANT 85: note = Any amino acid
  VARIANT 87: note = Any amino acid
  VARIANT 89: note = Any amino acid
  VARIANT 90: note = Any amino acid
DXXXXXXXXXXXXXXXXXXXXXXXXXXXXXXXXXXXXXXXXXXXXXEXXXXXXXXXXXXXXXXXXXXXXXXXXXXXXXXXXXXXXKXDXXD

SEQ ID NO: 795732 - protein, 108 aa, unidentified
  VARIANT 2: note = Any amino acid
  VARIANT 3: note = Any amino acid
  VARIANT 4: note = Any amino acid
  VARIANT 5: note = Any amino acid
  VARIANT 6: note = Any amino acid
  VARIANT 7: note = Any amino acid
  VARIANT 8: note = Any amino acid
  VARIANT 9: note = Any amino acid
  VARIANT 10: note = Any amino acid
  VARIANT 11: note = Any amino acid
  VARIANT 12: note = Any amino acid
  VARIANT 13: note = Any amino acid
  VARIANT 14: note = Any amino acid
  VARIANT 15: note = Any amino acid
  VARIANT 16: note = Any amino acid
  VARIANT 17: note = Any amino acid
  VARIANT 18: note = Any amino acid
  VARIANT 19: note = Any amino acid
  VARIANT 20: note = Any amino acid
  VARIANT 21: note = Any amino acid
  VARIANT 22: note = Any amino acid
  VARIANT 23: note = Any amino acid
  VARIANT 24: note = Any amino acid
  VARIANT 25: note = Any amino acid
  VARIANT 26: note = Any amino acid
  VARIANT 27: note = Any amino acid
  VARIANT 28: note = Any amino acid
  VARIANT 29: note = Any amino acid
  VARIANT 30: note = Any amino acid
  VARIANT 31: note = Any amino acid
  VARIANT 32: note = Any amino acid
  VARIANT 33: note = Any amino acid
  VARIANT 34: note = Any amino acid
  VARIANT 35: note = Any amino acid
  VARIANT 36: note = Any amino acid
  VARIANT 37: note = Any amino acid
  VARIANT 38: note = Any amino acid
  VARIANT 39: note = Any amino acid
  VARIANT 40: note = Any amino acid
  VARIANT 41: note = Any amino acid
  VARIANT 42: note = Any amino acid
  VARIANT 43: note = Any amino acid
  VARIANT 44: note = Any amino acid
  VARIANT 45: note = Any amino acid
  VARIANT 46: note = Any amino acid
  VARIANT 47: note = Any amino acid
  VARIANT 48: note = Any amino acid
  VARIANT 49: note = Any amino acid
  VARIANT 50: note = Any amino acid
  VARIANT 51: note = Any amino acid
  VARIANT 52: note = Any amino acid
  VARIANT 53: note = Any amino acid
  VARIANT 54: note = Any amino acid
  VARIANT 55: note = Any amino acid
  VARIANT 56: note = Any amino acid
  VARIANT 57: note = Any amino acid
  VARIANT 58: note = Any amino acid
  VARIANT 59: note = Any amino acid
  VARIANT 60: note = Any amino acid
  VARIANT 62: note = Any amino acid
  VARIANT 63: note = Any amino acid
  VARIANT 64: note = Any amino acid
  VARIANT 65: note = Any amino acid
  VARIANT 66: note = Any amino acid
  VARIANT 67: note = Any amino acid
  VARIANT 68: note = Any amino acid
  VARIANT 69: note = Any amino acid
  VARIANT 70: note = Any amino acid
  VARIANT 71: note = Any amino acid
  VARIANT 72: note = Any amino acid
  VARIANT 73: note = Any amino acid
  VARIANT 74: note = Any amino acid
  VARIANT 75: note = Any amino acid
  VARIANT 76: note = Any amino acid
  VARIANT 77: note = Any amino acid
  VARIANT 78: note = Any amino acid
  VARIANT 79: note = Any amino acid
  VARIANT 80: note = Any amino acid
  VARIANT 81: note = Any amino acid
  VARIANT 82: note = Any amino acid
  VARIANT 83: note = Any amino acid
  VARIANT 84: note = Any amino acid
  VARIANT 85: note = Any amino acid
  VARIANT 86: note = Any amino acid
  VARIANT 87: note = Any amino acid
  VARIANT 88: note = Any amino acid
  VARIANT 89: note = Any amino acid
  VARIANT 90: note = Any amino acid
  VARIANT 91: note = Any amino acid
  VARIANT 92: note = Any amino acid
  VARIANT 93: note = Any amino acid
  VARIANT 94: note = Any amino acid
  VARIANT 95: note = Any amino acid
  VARIANT 96: note = Any amino acid
  VARIANT 97: note = Any amino acid
  VARIANT 98: note = Any amino acid
  VARIANT 99: note = Any amino acid
  VARIANT 100: note = Any amino acid
  VARIANT 101: note = Any amino acid
  VARIANT 102: note = Any amino acid
  VARIANT 104: note = Any amino acid
  VARIANT 106: note = Any amino acid
  VARIANT 107: note = Any amino acid
DXXXXXXXXXXXXXXXXXXXXXXXXXXXXXXXXXXXXXXXXXXXXXXXXXXXXXXXXXXXEXXXXXXXXXXXXXXXXXXXXXXXXXXXXXXXXXXXXXXXXXKXDXXD

SEQ ID NO: 795733 - protein, 85 aa, unidentified
  VARIANT 2: note = Any amino acid
  VARIANT 3: note = Any amino acid
  VARIANT 4: note = Any amino acid
  VARIANT 5: note = Any amino acid
  VARIANT 6: note = Any amino acid
  VARIANT 7: note = Any amino acid
  VARIANT 8: note = Any amino acid
  VARIANT 9: note = Any amino acid
  VARIANT 10: note = Any amino acid
  VARIANT 11: note = Any amino acid
  VARIANT 12: note = Any amino acid
  VARIANT 13: note = Any amino acid
  VARIANT 14: note = Any amino acid
  VARIANT 15: note = Any amino acid
  VARIANT 16: note = Any amino acid
  VARIANT 17: note = Any amino acid
  VARIANT 18: note = Any amino acid
  VARIANT 19: note = Any amino acid
  VARIANT 20: note = Any amino acid
  VARIANT 21: note = Any amino acid
  VARIANT 22: note = Any amino acid
  VARIANT 23: note = Any amino acid
  VARIANT 24: note = Any amino acid
  VARIANT 25: note = Any amino acid
  VARIANT 26: note = Any amino acid
  VARIANT 27: note = Any amino acid
  VARIANT 28: note = Any amino acid
  VARIANT 29: note = Any amino acid
  VARIANT 30: note = Any amino acid
  VARIANT 31: note = Any amino acid
  VARIANT 32: note = Any amino acid
  VARIANT 33: note = Any amino acid
  VARIANT 34: note = Any amino acid
  VARIANT 35: note = Any amino acid
  VARIANT 36: note = Any amino acid
  VARIANT 37: note = Any amino acid
  VARIANT 38: note = Any amino acid
  VARIANT 39: note = Any amino acid
  VARIANT 40: note = Any amino acid
  VARIANT 41: note = Any amino acid
  VARIANT 42: note = Any amino acid
  VARIANT 43: note = Any amino acid
  VARIANT 44: note = Any amino acid
  VARIANT 45: note = Any amino acid
  VARIANT 47: note = Any amino acid
  VARIANT 48: note = Any amino acid
  VARIANT 49: note = Any amino acid
  VARIANT 50: note = Any amino acid
  VARIANT 51: note = Any amino acid
  VARIANT 52: note = Any amino acid
  VARIANT 53: note = Any amino acid
  VARIANT 54: note = Any amino acid
  VARIANT 55: note = Any amino acid
  VARIANT 56: note = Any amino acid
  VARIANT 57: note = Any amino acid
  VARIANT 58: note = Any amino acid
  VARIANT 59: note = Any amino acid
  VARIANT 60: note = Any amino acid
  VARIANT 61: note = Any amino acid
  VARIANT 62: note = Any amino acid
  VARIANT 63: note = Any amino acid
  VARIANT 64: note = Any amino acid
  VARIANT 65: note = Any amino acid
  VARIANT 66: note = Any amino acid
  VARIANT 67: note = Any amino acid
  VARIANT 68: note = Any amino acid
  VARIANT 69: note = Any amino acid
  VARIANT 70: note = Any amino acid
  VARIANT 71: note = Any amino acid
  VARIANT 72: note = Any amino acid
  VARIANT 73: note = Any amino acid
  VARIANT 74: note = Any amino acid
  VARIANT 75: note = Any amino acid
  VARIANT 76: note = Any amino acid
  VARIANT 77: note = Any amino acid
  VARIANT 78: note = Any amino acid
  VARIANT 79: note = Any amino acid
  VARIANT 81: note = Any amino acid
  VARIANT 83: note = Any amino acid
  VARIANT 84: note = Any amino acid
DXXXXXXXXXXXXXXXXXXXXXXXXXXXXXXXXXXXXXXXXXXXXEXXXXXXXXXXXXXXXXXXXXXXXXXXXXXXXXXKXDXXD

SEQ ID NO: 795734 - protein, 90 aa, unidentified
  VARIANT 2: note = Any amino acid
  VARIANT 3: note = Any amino acid
  VARIANT 4: note = Any amino acid
  VARIANT 5: note = Any amino acid
  VARIANT 6: note = Any amino acid
  VARIANT 7: note = Any amino acid
  VARIANT 8: note = Any amino acid
  VARIANT 9: note = Any amino acid
  VARIANT 10: note = Any amino acid
  VARIANT 11: note = Any amino acid
  VARIANT 12: note = Any amino acid
  VARIANT 13: note = Any amino acid
  VARIANT 14: note = Any amino acid
  VARIANT 15: note = Any amino acid
  VARIANT 16: note = Any amino acid
  VARIANT 17: note = Any amino acid
  VARIANT 18: note = Any amino acid
  VARIANT 19: note = Any amino acid
  VARIANT 20: note = Any amino acid
  VARIANT 21: note = Any amino acid
  VARIANT 22: note = Any amino acid
  VARIANT 23: note = Any amino acid
  VARIANT 24: note = Any amino acid
  VARIANT 25: note = Any amino acid
  VARIANT 26: note = Any amino acid
  VARIANT 27: note = Any amino acid
  VARIANT 28: note = Any amino acid
  VARIANT 29: note = Any amino acid
  VARIANT 30: note = Any amino acid
  VARIANT 31: note = Any amino acid
  VARIANT 32: note = Any amino acid
  VARIANT 33: note = Any amino acid
  VARIANT 34: note = Any amino acid
  VARIANT 35: note = Any amino acid
  VARIANT 36: note = Any amino acid
  VARIANT 37: note = Any amino acid
  VARIANT 38: note = Any amino acid
  VARIANT 39: note = Any amino acid
  VARIANT 40: note = Any amino acid
  VARIANT 41: note = Any amino acid
  VARIANT 42: note = Any amino acid
  VARIANT 43: note = Any amino acid
  VARIANT 44: note = Any amino acid
  VARIANT 45: note = Any amino acid
  VARIANT 47: note = Any amino acid
  VARIANT 48: note = Any amino acid
  VARIANT 49: note = Any amino acid
  VARIANT 50: note = Any amino acid
  VARIANT 51: note = Any amino acid
  VARIANT 52: note = Any amino acid
  VARIANT 53: note = Any amino acid
  VARIANT 54: note = Any amino acid
  VARIANT 55: note = Any amino acid
  VARIANT 56: note = Any amino acid
  VARIANT 57: note = Any amino acid
  VARIANT 58: note = Any amino acid
  VARIANT 59: note = Any amino acid
  VARIANT 60: note = Any amino acid
  VARIANT 61: note = Any amino acid
  VARIANT 62: note = Any amino acid
  VARIANT 63: note = Any amino acid
  VARIANT 64: note = Any amino acid
  VARIANT 65: note = Any amino acid
  VARIANT 66: note = Any amino acid
  VARIANT 67: note = Any amino acid
  VARIANT 68: note = Any amino acid
  VARIANT 69: note = Any amino acid
  VARIANT 70: note = Any amino acid
  VARIANT 71: note = Any amino acid
  VARIANT 72: note = Any amino acid
  VARIANT 73: note = Any amino acid
  VARIANT 74: note = Any amino acid
  VARIANT 75: note = Any amino acid
  VARIANT 76: note = Any amino acid
  VARIANT 77: note = Any amino acid
  VARIANT 78: note = Any amino acid
  VARIANT 79: note = Any amino acid
  VARIANT 80: note = Any amino acid
  VARIANT 81: note = Any amino acid
  VARIANT 82: note = Any amino acid
  VARIANT 83: note = Any amino acid
  VARIANT 84: note = Any amino acid
  VARIANT 86: note = Any amino acid
  VARIANT 88: note = Any amino acid
  VARIANT 89: note = Any amino acid
DXXXXXXXXXXXXXXXXXXXXXXXXXXXXXXXXXXXXXXXXXXXXEXXXXXXXXXXXXXXXXXXXXXXXXXXXXXXXXXXXXXXKXDXXD

SEQ ID NO: 795735 - protein, 103 aa, unidentified
  VARIANT 2: note = Any amino acid
  VARIANT 3: note = Any amino acid
  VARIANT 4: note = Any amino acid
  VARIANT 5: note = Any amino acid
  VARIANT 6: note = Any amino acid
  VARIANT 7: note = Any amino acid
  VARIANT 8: note = Any amino acid
  VARIANT 9: note = Any amino acid
  VARIANT 10: note = Any amino acid
  VARIANT 11: note = Any amino acid
  VARIANT 12: note = Any amino acid
  VARIANT 13: note = Any amino acid
  VARIANT 14: note = Any amino acid
  VARIANT 15: note = Any amino acid
  VARIANT 16: note = Any amino acid
  VARIANT 17: note = Any amino acid
  VARIANT 18: note = Any amino acid
  VARIANT 19: note = Any amino acid
  VARIANT 20: note = Any amino acid
  VARIANT 21: note = Any amino acid
  VARIANT 22: note = Any amino acid
  VARIANT 23: note = Any amino acid
  VARIANT 24: note = Any amino acid
  VARIANT 25: note = Any amino acid
  VARIANT 26: note = Any amino acid
  VARIANT 27: note = Any amino acid
  VARIANT 28: note = Any amino acid
  VARIANT 29: note = Any amino acid
  VARIANT 30: note = Any amino acid
  VARIANT 31: note = Any amino acid
  VARIANT 32: note = Any amino acid
  VARIANT 33: note = Any amino acid
  VARIANT 34: note = Any amino acid
  VARIANT 35: note = Any amino acid
  VARIANT 36: note = Any amino acid
  VARIANT 37: note = Any amino acid
  VARIANT 38: note = Any amino acid
  VARIANT 39: note = Any amino acid
  VARIANT 40: note = Any amino acid
  VARIANT 41: note = Any amino acid
  VARIANT 42: note = Any amino acid
  VARIANT 43: note = Any amino acid
  VARIANT 44: note = Any amino acid
  VARIANT 45: note = Any amino acid
  VARIANT 46: note = Any amino acid
  VARIANT 47: note = Any amino acid
  VARIANT 48: note = Any amino acid
  VARIANT 49: note = Any amino acid
  VARIANT 50: note = Any amino acid
  VARIANT 51: note = Any amino acid
  VARIANT 52: note = Any amino acid
  VARIANT 53: note = Any amino acid
  VARIANT 54: note = Any amino acid
  VARIANT 55: note = Any amino acid
  VARIANT 56: note = Any amino acid
  VARIANT 58: note = Any amino acid
  VARIANT 59: note = Any amino acid
  VARIANT 60: note = Any amino acid
  VARIANT 61: note = Any amino acid
  VARIANT 62: note = Any amino acid
  VARIANT 63: note = Any amino acid
  VARIANT 64: note = Any amino acid
  VARIANT 65: note = Any amino acid
  VARIANT 66: note = Any amino acid
  VARIANT 67: note = Any amino acid
  VARIANT 68: note = Any amino acid
  VARIANT 69: note = Any amino acid
  VARIANT 70: note = Any amino acid
  VARIANT 71: note = Any amino acid
  VARIANT 72: note = Any amino acid
  VARIANT 73: note = Any amino acid
  VARIANT 74: note = Any amino acid
  VARIANT 75: note = Any amino acid
  VARIANT 76: note = Any amino acid
  VARIANT 77: note = Any amino acid
  VARIANT 78: note = Any amino acid
  VARIANT 79: note = Any amino acid
  VARIANT 80: note = Any amino acid
  VARIANT 81: note = Any amino acid
  VARIANT 82: note = Any amino acid
  VARIANT 83: note = Any amino acid
  VARIANT 84: note = Any amino acid
  VARIANT 85: note = Any amino acid
  VARIANT 86: note = Any amino acid
  VARIANT 87: note = Any amino acid
  VARIANT 88: note = Any amino acid
  VARIANT 89: note = Any amino acid
  VARIANT 90: note = Any amino acid
  VARIANT 91: note = Any amino acid
  VARIANT 92: note = Any amino acid
  VARIANT 93: note = Any amino acid
  VARIANT 94: note = Any amino acid
  VARIANT 95: note = Any amino acid
  VARIANT 96: note = Any amino acid
  VARIANT 97: note = Any amino acid
  VARIANT 99: note = Any amino acid
  VARIANT 101: note = Any amino acid
  VARIANT 102: note = Any amino acid
DXXXXXXXXXXXXXXXXXXXXXXXXXXXXXXXXXXXXXXXXXXXXXXXXXXXXXXXEXXXXXXXXXXXXXXXXXXXXXXXXXXXXXXXXXXXXXXXXRXDXXD

SEQ ID NO: 795736 - protein, 107 aa, unidentified
  VARIANT 2: note = Any amino acid
  VARIANT 3: note = Any amino acid
  VARIANT 4: note = Any amino acid
  VARIANT 5: note = Any amino acid
  VARIANT 6: note = Any amino acid
  VARIANT 7: note = Any amino acid
  VARIANT 8: note = Any amino acid
  VARIANT 9: note = Any amino acid
  VARIANT 10: note = Any amino acid
  VARIANT 11: note = Any amino acid
  VARIANT 12: note = Any amino acid
  VARIANT 13: note = Any amino acid
  VARIANT 14: note = Any amino acid
  VARIANT 15: note = Any amino acid
  VARIANT 16: note = Any amino acid
  VARIANT 17: note = Any amino acid
  VARIANT 18: note = Any amino acid
  VARIANT 19: note = Any amino acid
  VARIANT 20: note = Any amino acid
  VARIANT 21: note = Any amino acid
  VARIANT 22: note = Any amino acid
  VARIANT 23: note = Any amino acid
  VARIANT 24: note = Any amino acid
  VARIANT 25: note = Any amino acid
  VARIANT 26: note = Any amino acid
  VARIANT 27: note = Any amino acid
  VARIANT 28: note = Any amino acid
  VARIANT 29: note = Any amino acid
  VARIANT 30: note = Any amino acid
  VARIANT 31: note = Any amino acid
  VARIANT 32: note = Any amino acid
  VARIANT 33: note = Any amino acid
  VARIANT 34: note = Any amino acid
  VARIANT 35: note = Any amino acid
  VARIANT 36: note = Any amino acid
  VARIANT 37: note = Any amino acid
  VARIANT 38: note = Any amino acid
  VARIANT 39: note = Any amino acid
  VARIANT 40: note = Any amino acid
  VARIANT 41: note = Any amino acid
  VARIANT 42: note = Any amino acid
  VARIANT 43: note = Any amino acid
  VARIANT 44: note = Any amino acid
  VARIANT 45: note = Any amino acid
  VARIANT 46: note = Any amino acid
  VARIANT 47: note = Any amino acid
  VARIANT 48: note = Any amino acid
  VARIANT 49: note = Any amino acid
  VARIANT 50: note = Any amino acid
  VARIANT 51: note = Any amino acid
  VARIANT 52: note = Any amino acid
  VARIANT 53: note = Any amino acid
  VARIANT 54: note = Any amino acid
  VARIANT 55: note = Any amino acid
  VARIANT 56: note = Any amino acid
  VARIANT 58: note = Any amino acid
  VARIANT 59: note = Any amino acid
  VARIANT 60: note = Any amino acid
  VARIANT 61: note = Any amino acid
  VARIANT 62: note = Any amino acid
  VARIANT 63: note = Any amino acid
  VARIANT 64: note = Any amino acid
  VARIANT 65: note = Any amino acid
  VARIANT 66: note = Any amino acid
  VARIANT 67: note = Any amino acid
  VARIANT 68: note = Any amino acid
  VARIANT 69: note = Any amino acid
  VARIANT 70: note = Any amino acid
  VARIANT 71: note = Any amino acid
  VARIANT 72: note = Any amino acid
  VARIANT 73: note = Any amino acid
  VARIANT 74: note = Any amino acid
  VARIANT 75: note = Any amino acid
  VARIANT 76: note = Any amino acid
  VARIANT 77: note = Any amino acid
  VARIANT 78: note = Any amino acid
  VARIANT 79: note = Any amino acid
  VARIANT 80: note = Any amino acid
  VARIANT 81: note = Any amino acid
  VARIANT 82: note = Any amino acid
  VARIANT 83: note = Any amino acid
  VARIANT 84: note = Any amino acid
  VARIANT 85: note = Any amino acid
  VARIANT 86: note = Any amino acid
  VARIANT 87: note = Any amino acid
  VARIANT 88: note = Any amino acid
  VARIANT 89: note = Any amino acid
  VARIANT 90: note = Any amino acid
  VARIANT 91: note = Any amino acid
  VARIANT 92: note = Any amino acid
  VARIANT 93: note = Any amino acid
  VARIANT 94: note = Any amino acid
  VARIANT 95: note = Any amino acid
  VARIANT 96: note = Any amino acid
  VARIANT 97: note = Any amino acid
  VARIANT 98: note = Any amino acid
  VARIANT 99: note = Any amino acid
  VARIANT 100: note = Any amino acid
  VARIANT 101: note = Any amino acid
  VARIANT 103: note = Any amino acid
  VARIANT 105: note = Any amino acid
  VARIANT 106: note = Any amino acid
DXXXXXXXXXXXXXXXXXXXXXXXXXXXXXXXXXXXXXXXXXXXXXXXXXXXXXXXEXXXXXXXXXXXXXXXXXXXXXXXXXXXXXXXXXXXXXXXXXXXXKXDXXD

SEQ ID NO: 795737 - protein, 101 aa, unidentified
  VARIANT 2: note = Any amino acid
  VARIANT 3: note = Any amino acid
  VARIANT 4: note = Any amino acid
  VARIANT 5: note = Any amino acid
  VARIANT 6: note = Any amino acid
  VARIANT 7: note = Any amino acid
  VARIANT 8: note = Any amino acid
  VARIANT 9: note = Any amino acid
  VARIANT 10: note = Any amino acid
  VARIANT 11: note = Any amino acid
  VARIANT 12: note = Any amino acid
  VARIANT 13: note = Any amino acid
  VARIANT 14: note = Any amino acid
  VARIANT 15: note = Any amino acid
  VARIANT 16: note = Any amino acid
  VARIANT 17: note = Any amino acid
  VARIANT 18: note = Any amino acid
  VARIANT 19: note = Any amino acid
  VARIANT 20: note = Any amino acid
  VARIANT 21: note = Any amino acid
  VARIANT 22: note = Any amino acid
  VARIANT 23: note = Any amino acid
  VARIANT 24: note = Any amino acid
  VARIANT 25: note = Any amino acid
  VARIANT 26: note = Any amino acid
  VARIANT 27: note = Any amino acid
  VARIANT 28: note = Any amino acid
  VARIANT 29: note = Any amino acid
  VARIANT 30: note = Any amino acid
  VARIANT 31: note = Any amino acid
  VARIANT 32: note = Any amino acid
  VARIANT 33: note = Any amino acid
  VARIANT 34: note = Any amino acid
  VARIANT 35: note = Any amino acid
  VARIANT 36: note = Any amino acid
  VARIANT 37: note = Any amino acid
  VARIANT 38: note = Any amino acid
  VARIANT 39: note = Any amino acid
  VARIANT 40: note = Any amino acid
  VARIANT 41: note = Any amino acid
  VARIANT 42: note = Any amino acid
  VARIANT 43: note = Any amino acid
  VARIANT 44: note = Any amino acid
  VARIANT 45: note = Any amino acid
  VARIANT 46: note = Any amino acid
  VARIANT 47: note = Any amino acid
  VARIANT 48: note = Any amino acid
  VARIANT 49: note = Any amino acid
  VARIANT 50: note = Any amino acid
  VARIANT 51: note = Any amino acid
  VARIANT 52: note = Any amino acid
  VARIANT 53: note = Any amino acid
  VARIANT 54: note = Any amino acid
  VARIANT 55: note = Any amino acid
  VARIANT 56: note = Any amino acid
  VARIANT 57: note = Any amino acid
  VARIANT 59: note = Any amino acid
  VARIANT 60: note = Any amino acid
  VARIANT 61: note = Any amino acid
  VARIANT 62: note = Any amino acid
  VARIANT 63: note = Any amino acid
  VARIANT 64: note = Any amino acid
  VARIANT 65: note = Any amino acid
  VARIANT 66: note = Any amino acid
  VARIANT 67: note = Any amino acid
  VARIANT 68: note = Any amino acid
  VARIANT 69: note = Any amino acid
  VARIANT 70: note = Any amino acid
  VARIANT 71: note = Any amino acid
  VARIANT 72: note = Any amino acid
  VARIANT 73: note = Any amino acid
  VARIANT 74: note = Any amino acid
  VARIANT 75: note = Any amino acid
  VARIANT 76: note = Any amino acid
  VARIANT 77: note = Any amino acid
  VARIANT 78: note = Any amino acid
  VARIANT 79: note = Any amino acid
  VARIANT 80: note = Any amino acid
  VARIANT 81: note = Any amino acid
  VARIANT 82: note = Any amino acid
  VARIANT 83: note = Any amino acid
  VARIANT 84: note = Any amino acid
  VARIANT 85: note = Any amino acid
  VARIANT 86: note = Any amino acid
  VARIANT 87: note = Any amino acid
  VARIANT 88: note = Any amino acid
  VARIANT 89: note = Any amino acid
  VARIANT 90: note = Any amino acid
  VARIANT 91: note = Any amino acid
  VARIANT 92: note = Any amino acid
  VARIANT 93: note = Any amino acid
  VARIANT 94: note = Any amino acid
  VARIANT 95: note = Any amino acid
  VARIANT 97: note = Any amino acid
  VARIANT 99: note = Any amino acid
  VARIANT 100: note = Any amino acid
DXXXXXXXXXXXXXXXXXXXXXXXXXXXXXXXXXXXXXXXXXXXXXXXXXXXXXXXXEXXXXXXXXXXXXXXXXXXXXXXXXXXXXXXXXXXXXXKXDXXD

SEQ ID NO: 795738 - protein, 94 aa, unidentified
  VARIANT 2: note = Any amino acid
  VARIANT 3: note = Any amino acid
  VARIANT 4: note = Any amino acid
  VARIANT 5: note = Any amino acid
  VARIANT 6: note = Any amino acid
  VARIANT 7: note = Any amino acid
  VARIANT 8: note = Any amino acid
  VARIANT 9: note = Any amino acid
  VARIANT 10: note = Any amino acid
  VARIANT 11: note = Any amino acid
  VARIANT 12: note = Any amino acid
  VARIANT 13: note = Any amino acid
  VARIANT 14: note = Any amino acid
  VARIANT 15: note = Any amino acid
  VARIANT 16: note = Any amino acid
  VARIANT 17: note = Any amino acid
  VARIANT 18: note = Any amino acid
  VARIANT 19: note = Any amino acid
  VARIANT 20: note = Any amino acid
  VARIANT 21: note = Any amino acid
  VARIANT 22: note = Any amino acid
  VARIANT 23: note = Any amino acid
  VARIANT 24: note = Any amino acid
  VARIANT 25: note = Any amino acid
  VARIANT 26: note = Any amino acid
  VARIANT 27: note = Any amino acid
  VARIANT 28: note = Any amino acid
  VARIANT 29: note = Any amino acid
  VARIANT 30: note = Any amino acid
  VARIANT 31: note = Any amino acid
  VARIANT 32: note = Any amino acid
  VARIANT 33: note = Any amino acid
  VARIANT 34: note = Any amino acid
  VARIANT 35: note = Any amino acid
  VARIANT 36: note = Any amino acid
  VARIANT 37: note = Any amino acid
  VARIANT 38: note = Any amino acid
  VARIANT 39: note = Any amino acid
  VARIANT 40: note = Any amino acid
  VARIANT 41: note = Any amino acid
  VARIANT 42: note = Any amino acid
  VARIANT 43: note = Any amino acid
  VARIANT 44: note = Any amino acid
  VARIANT 45: note = Any amino acid
  VARIANT 46: note = Any amino acid
  VARIANT 47: note = Any amino acid
  VARIANT 49: note = Any amino acid
  VARIANT 50: note = Any amino acid
  VARIANT 51: note = Any amino acid
  VARIANT 52: note = Any amino acid
  VARIANT 53: note = Any amino acid
  VARIANT 54: note = Any amino acid
  VARIANT 55: note = Any amino acid
  VARIANT 56: note = Any amino acid
  VARIANT 57: note = Any amino acid
  VARIANT 58: note = Any amino acid
  VARIANT 59: note = Any amino acid
  VARIANT 60: note = Any amino acid
  VARIANT 61: note = Any amino acid
  VARIANT 62: note = Any amino acid
  VARIANT 63: note = Any amino acid
  VARIANT 64: note = Any amino acid
  VARIANT 65: note = Any amino acid
  VARIANT 66: note = Any amino acid
  VARIANT 67: note = Any amino acid
  VARIANT 68: note = Any amino acid
  VARIANT 69: note = Any amino acid
  VARIANT 70: note = Any amino acid
  VARIANT 71: note = Any amino acid
  VARIANT 72: note = Any amino acid
  VARIANT 73: note = Any amino acid
  VARIANT 74: note = Any amino acid
  VARIANT 75: note = Any amino acid
  VARIANT 76: note = Any amino acid
  VARIANT 77: note = Any amino acid
  VARIANT 78: note = Any amino acid
  VARIANT 79: note = Any amino acid
  VARIANT 80: note = Any amino acid
  VARIANT 81: note = Any amino acid
  VARIANT 82: note = Any amino acid
  VARIANT 83: note = Any amino acid
  VARIANT 84: note = Any amino acid
  VARIANT 85: note = Any amino acid
  VARIANT 86: note = Any amino acid
  VARIANT 87: note = Any amino acid
  VARIANT 88: note = Any amino acid
  VARIANT 90: note = Any amino acid
  VARIANT 92: note = Any amino acid
  VARIANT 93: note = Any amino acid
DXXXXXXXXXXXXXXXXXXXXXXXXXXXXXXXXXXXXXXXXXXXXXXAXXXXXXXXXXXXXXXXXXXXXXXXXXXXXXXXXXXXXXXXKXDXXD

SEQ ID NO: 795739 - protein, 100 aa, unidentified
  VARIANT 2: note = Any amino acid
  VARIANT 3: note = Any amino acid
  VARIANT 4: note = Any amino acid
  VARIANT 5: note = Any amino acid
  VARIANT 6: note = Any amino acid
  VARIANT 7: note = Any amino acid
  VARIANT 8: note = Any amino acid
  VARIANT 9: note = Any amino acid
  VARIANT 10: note = Any amino acid
  VARIANT 11: note = Any amino acid
  VARIANT 12: note = Any amino acid
  VARIANT 13: note = Any amino acid
  VARIANT 14: note = Any amino acid
  VARIANT 15: note = Any amino acid
  VARIANT 16: note = Any amino acid
  VARIANT 17: note = Any amino acid
  VARIANT 18: note = Any amino acid
  VARIANT 19: note = Any amino acid
  VARIANT 20: note = Any amino acid
  VARIANT 21: note = Any amino acid
  VARIANT 22: note = Any amino acid
  VARIANT 23: note = Any amino acid
  VARIANT 24: note = Any amino acid
  VARIANT 25: note = Any amino acid
  VARIANT 26: note = Any amino acid
  VARIANT 27: note = Any amino acid
  VARIANT 28: note = Any amino acid
  VARIANT 29: note = Any amino acid
  VARIANT 30: note = Any amino acid
  VARIANT 31: note = Any amino acid
  VARIANT 32: note = Any amino acid
  VARIANT 33: note = Any amino acid
  VARIANT 34: note = Any amino acid
  VARIANT 35: note = Any amino acid
  VARIANT 36: note = Any amino acid
  VARIANT 37: note = Any amino acid
  VARIANT 38: note = Any amino acid
  VARIANT 39: note = Any amino acid
  VARIANT 40: note = Any amino acid
  VARIANT 41: note = Any amino acid
  VARIANT 42: note = Any amino acid
  VARIANT 43: note = Any amino acid
  VARIANT 44: note = Any amino acid
  VARIANT 45: note = Any amino acid
  VARIANT 46: note = Any amino acid
  VARIANT 47: note = Any amino acid
  VARIANT 48: note = Any amino acid
  VARIANT 49: note = Any amino acid
  VARIANT 50: note = Any amino acid
  VARIANT 51: note = Any amino acid
  VARIANT 52: note = Any amino acid
  VARIANT 53: note = Any amino acid
  VARIANT 54: note = Any amino acid
  VARIANT 56: note = Any amino acid
  VARIANT 57: note = Any amino acid
  VARIANT 58: note = Any amino acid
  VARIANT 59: note = Any amino acid
  VARIANT 60: note = Any amino acid
  VARIANT 61: note = Any amino acid
  VARIANT 62: note = Any amino acid
  VARIANT 63: note = Any amino acid
  VARIANT 64: note = Any amino acid
  VARIANT 65: note = Any amino acid
  VARIANT 66: note = Any amino acid
  VARIANT 67: note = Any amino acid
  VARIANT 68: note = Any amino acid
  VARIANT 69: note = Any amino acid
  VARIANT 70: note = Any amino acid
  VARIANT 71: note = Any amino acid
  VARIANT 72: note = Any amino acid
  VARIANT 73: note = Any amino acid
  VARIANT 74: note = Any amino acid
  VARIANT 75: note = Any amino acid
  VARIANT 76: note = Any amino acid
  VARIANT 77: note = Any amino acid
  VARIANT 78: note = Any amino acid
  VARIANT 79: note = Any amino acid
  VARIANT 80: note = Any amino acid
  VARIANT 81: note = Any amino acid
  VARIANT 82: note = Any amino acid
  VARIANT 83: note = Any amino acid
  VARIANT 84: note = Any amino acid
  VARIANT 85: note = Any amino acid
  VARIANT 86: note = Any amino acid
  VARIANT 87: note = Any amino acid
  VARIANT 88: note = Any amino acid
  VARIANT 89: note = Any amino acid
  VARIANT 90: note = Any amino acid
  VARIANT 91: note = Any amino acid
  VARIANT 92: note = Any amino acid
  VARIANT 93: note = Any amino acid
  VARIANT 94: note = Any amino acid
  VARIANT 96: note = Any amino acid
  VARIANT 98: note = Any amino acid
  VARIANT 99: note = Any amino acid
DXXXXXXXXXXXXXXXXXXXXXXXXXXXXXXXXXXXXXXXXXXXXXXXXXXXXXGXXXXXXXXXXXXXXXXXXXXXXXXXXXXXXXXXXXXXXXKXDXXD

SEQ ID NO: 795740 - protein, 107 aa, unidentified
  VARIANT 2: note = Any amino acid
  VARIANT 3: note = Any amino acid
  VARIANT 4: note = Any amino acid
  VARIANT 5: note = Any amino acid
  VARIANT 6: note = Any amino acid
  VARIANT 7: note = Any amino acid
  VARIANT 8: note = Any amino acid
  VARIANT 9: note = Any amino acid
  VARIANT 10: note = Any amino acid
  VARIANT 11: note = Any amino acid
  VARIANT 12: note = Any amino acid
  VARIANT 13: note = Any amino acid
  VARIANT 14: note = Any amino acid
  VARIANT 15: note = Any amino acid
  VARIANT 16: note = Any amino acid
  VARIANT 17: note = Any amino acid
  VARIANT 18: note = Any amino acid
  VARIANT 19: note = Any amino acid
  VARIANT 20: note = Any amino acid
  VARIANT 21: note = Any amino acid
  VARIANT 22: note = Any amino acid
  VARIANT 23: note = Any amino acid
  VARIANT 24: note = Any amino acid
  VARIANT 25: note = Any amino acid
  VARIANT 26: note = Any amino acid
  VARIANT 27: note = Any amino acid
  VARIANT 28: note = Any amino acid
  VARIANT 29: note = Any amino acid
  VARIANT 30: note = Any amino acid
  VARIANT 31: note = Any amino acid
  VARIANT 32: note = Any amino acid
  VARIANT 33: note = Any amino acid
  VARIANT 34: note = Any amino acid
  VARIANT 35: note = Any amino acid
  VARIANT 36: note = Any amino acid
  VARIANT 37: note = Any amino acid
  VARIANT 38: note = Any amino acid
  VARIANT 39: note = Any amino acid
  VARIANT 40: note = Any amino acid
  VARIANT 41: note = Any amino acid
  VARIANT 42: note = Any amino acid
  VARIANT 43: note = Any amino acid
  VARIANT 44: note = Any amino acid
  VARIANT 45: note = Any amino acid
  VARIANT 46: note = Any amino acid
  VARIANT 47: note = Any amino acid
  VARIANT 48: note = Any amino acid
  VARIANT 49: note = Any amino acid
  VARIANT 50: note = Any amino acid
  VARIANT 51: note = Any amino acid
  VARIANT 52: note = Any amino acid
  VARIANT 53: note = Any amino acid
  VARIANT 54: note = Any amino acid
  VARIANT 55: note = Any amino acid
  VARIANT 56: note = Any amino acid
  VARIANT 57: note = Any amino acid
  VARIANT 58: note = Any amino acid
  VARIANT 59: note = Any amino acid
  VARIANT 60: note = Any amino acid
  VARIANT 61: note = Any amino acid
  VARIANT 63: note = Any amino acid
  VARIANT 64: note = Any amino acid
  VARIANT 65: note = Any amino acid
  VARIANT 66: note = Any amino acid
  VARIANT 67: note = Any amino acid
  VARIANT 68: note = Any amino acid
  VARIANT 69: note = Any amino acid
  VARIANT 70: note = Any amino acid
  VARIANT 71: note = Any amino acid
  VARIANT 72: note = Any amino acid
  VARIANT 73: note = Any amino acid
  VARIANT 74: note = Any amino acid
  VARIANT 75: note = Any amino acid
  VARIANT 76: note = Any amino acid
  VARIANT 77: note = Any amino acid
  VARIANT 78: note = Any amino acid
  VARIANT 79: note = Any amino acid
  VARIANT 80: note = Any amino acid
  VARIANT 81: note = Any amino acid
  VARIANT 82: note = Any amino acid
  VARIANT 83: note = Any amino acid
  VARIANT 84: note = Any amino acid
  VARIANT 85: note = Any amino acid
  VARIANT 86: note = Any amino acid
  VARIANT 87: note = Any amino acid
  VARIANT 88: note = Any amino acid
  VARIANT 89: note = Any amino acid
  VARIANT 90: note = Any amino acid
  VARIANT 91: note = Any amino acid
  VARIANT 92: note = Any amino acid
  VARIANT 93: note = Any amino acid
  VARIANT 94: note = Any amino acid
  VARIANT 95: note = Any amino acid
  VARIANT 96: note = Any amino acid
  VARIANT 97: note = Any amino acid
  VARIANT 98: note = Any amino acid
  VARIANT 99: note = Any amino acid
  VARIANT 100: note = Any amino acid
  VARIANT 101: note = Any amino acid
  VARIANT 103: note = Any amino acid
  VARIANT 105: note = Any amino acid
  VARIANT 106: note = Any amino acid
DXXXXXXXXXXXXXXXXXXXXXXXXXXXXXXXXXXXXXXXXXXXXXXXXXXXXXXXXXXXXEXXXXXXXXXXXXXXXXXXXXXXXXXXXXXXXXXXXXXXXKXDXXD

SEQ ID NO: 795741 - protein, 97 aa, unidentified
  VARIANT 2: note = Any amino acid
  VARIANT 3: note = Any amino acid
  VARIANT 4: note = Any amino acid
  VARIANT 5: note = Any amino acid
  VARIANT 6: note = Any amino acid
  VARIANT 7: note = Any amino acid
  VARIANT 8: note = Any amino acid
  VARIANT 9: note = Any amino acid
  VARIANT 10: note = Any amino acid
  VARIANT 11: note = Any amino acid
  VARIANT 12: note = Any amino acid
  VARIANT 13: note = Any amino acid
  VARIANT 14: note = Any amino acid
  VARIANT 15: note = Any amino acid
  VARIANT 16: note = Any amino acid
  VARIANT 17: note = Any amino acid
  VARIANT 18: note = Any amino acid
  VARIANT 19: note = Any amino acid
  VARIANT 20: note = Any amino acid
  VARIANT 21: note = Any amino acid
  VARIANT 22: note = Any amino acid
  VARIANT 23: note = Any amino acid
  VARIANT 24: note = Any amino acid
  VARIANT 25: note = Any amino acid
  VARIANT 26: note = Any amino acid
  VARIANT 27: note = Any amino acid
  VARIANT 28: note = Any amino acid
  VARIANT 29: note = Any amino acid
  VARIANT 30: note = Any amino acid
  VARIANT 31: note = Any amino acid
  VARIANT 32: note = Any amino acid
  VARIANT 33: note = Any amino acid
  VARIANT 34: note = Any amino acid
  VARIANT 35: note = Any amino acid
  VARIANT 36: note = Any amino acid
  VARIANT 37: note = Any amino acid
  VARIANT 38: note = Any amino acid
  VARIANT 39: note = Any amino acid
  VARIANT 40: note = Any amino acid
  VARIANT 41: note = Any amino acid
  VARIANT 42: note = Any amino acid
  VARIANT 43: note = Any amino acid
  VARIANT 44: note = Any amino acid
  VARIANT 45: note = Any amino acid
  VARIANT 46: note = Any amino acid
  VARIANT 47: note = Any amino acid
  VARIANT 48: note = Any amino acid
  VARIANT 49: note = Any amino acid
  VARIANT 51: note = Any amino acid
  VARIANT 52: note = Any amino acid
  VARIANT 53: note = Any amino acid
  VARIANT 54: note = Any amino acid
  VARIANT 55: note = Any amino acid
  VARIANT 56: note = Any amino acid
  VARIANT 57: note = Any amino acid
  VARIANT 58: note = Any amino acid
  VARIANT 59: note = Any amino acid
  VARIANT 60: note = Any amino acid
  VARIANT 61: note = Any amino acid
  VARIANT 62: note = Any amino acid
  VARIANT 63: note = Any amino acid
  VARIANT 64: note = Any amino acid
  VARIANT 65: note = Any amino acid
  VARIANT 66: note = Any amino acid
  VARIANT 67: note = Any amino acid
  VARIANT 68: note = Any amino acid
  VARIANT 69: note = Any amino acid
  VARIANT 70: note = Any amino acid
  VARIANT 71: note = Any amino acid
  VARIANT 72: note = Any amino acid
  VARIANT 73: note = Any amino acid
  VARIANT 74: note = Any amino acid
  VARIANT 75: note = Any amino acid
  VARIANT 76: note = Any amino acid
  VARIANT 77: note = Any amino acid
  VARIANT 78: note = Any amino acid
  VARIANT 79: note = Any amino acid
  VARIANT 80: note = Any amino acid
  VARIANT 81: note = Any amino acid
  VARIANT 82: note = Any amino acid
  VARIANT 83: note = Any amino acid
  VARIANT 84: note = Any amino acid
  VARIANT 85: note = Any amino acid
  VARIANT 86: note = Any amino acid
  VARIANT 87: note = Any amino acid
  VARIANT 88: note = Any amino acid
  VARIANT 89: note = Any amino acid
  VARIANT 90: note = Any amino acid
  VARIANT 91: note = Any amino acid
  VARIANT 93: note = Any amino acid
  VARIANT 95: note = Any amino acid
  VARIANT 96: note = Any amino acid
DXXXXXXXXXXXXXXXXXXXXXXXXXXXXXXXXXXXXXXXXXXXXXXXXPXXXXXXXXXXXXXXXXXXXXXXXXXXXXXXXXXXXXXXXXXKXDXXD

SEQ ID NO: 795742 - protein, 101 aa, unidentified
  VARIANT 2: note = Any amino acid
  VARIANT 3: note = Any amino acid
  VARIANT 4: note = Any amino acid
  VARIANT 5: note = Any amino acid
  VARIANT 6: note = Any amino acid
  VARIANT 7: note = Any amino acid
  VARIANT 8: note = Any amino acid
  VARIANT 9: note = Any amino acid
  VARIANT 10: note = Any amino acid
  VARIANT 11: note = Any amino acid
  VARIANT 12: note = Any amino acid
  VARIANT 13: note = Any amino acid
  VARIANT 14: note = Any amino acid
  VARIANT 15: note = Any amino acid
  VARIANT 16: note = Any amino acid
  VARIANT 17: note = Any amino acid
  VARIANT 18: note = Any amino acid
  VARIANT 19: note = Any amino acid
  VARIANT 20: note = Any amino acid
  VARIANT 21: note = Any amino acid
  VARIANT 22: note = Any amino acid
  VARIANT 23: note = Any amino acid
  VARIANT 24: note = Any amino acid
  VARIANT 25: note = Any amino acid
  VARIANT 26: note = Any amino acid
  VARIANT 27: note = Any amino acid
  VARIANT 28: note = Any amino acid
  VARIANT 29: note = Any amino acid
  VARIANT 30: note = Any amino acid
  VARIANT 31: note = Any amino acid
  VARIANT 32: note = Any amino acid
  VARIANT 33: note = Any amino acid
  VARIANT 34: note = Any amino acid
  VARIANT 35: note = Any amino acid
  VARIANT 36: note = Any amino acid
  VARIANT 37: note = Any amino acid
  VARIANT 38: note = Any amino acid
  VARIANT 39: note = Any amino acid
  VARIANT 40: note = Any amino acid
  VARIANT 41: note = Any amino acid
  VARIANT 42: note = Any amino acid
  VARIANT 43: note = Any amino acid
  VARIANT 44: note = Any amino acid
  VARIANT 45: note = Any amino acid
  VARIANT 46: note = Any amino acid
  VARIANT 47: note = Any amino acid
  VARIANT 48: note = Any amino acid
  VARIANT 49: note = Any amino acid
  VARIANT 50: note = Any amino acid
  VARIANT 51: note = Any amino acid
  VARIANT 52: note = Any amino acid
  VARIANT 53: note = Any amino acid
  VARIANT 54: note = Any amino acid
  VARIANT 56: note = Any amino acid
  VARIANT 57: note = Any amino acid
  VARIANT 58: note = Any amino acid
  VARIANT 59: note = Any amino acid
  VARIANT 60: note = Any amino acid
  VARIANT 61: note = Any amino acid
  VARIANT 62: note = Any amino acid
  VARIANT 63: note = Any amino acid
  VARIANT 64: note = Any amino acid
  VARIANT 65: note = Any amino acid
  VARIANT 66: note = Any amino acid
  VARIANT 67: note = Any amino acid
  VARIANT 68: note = Any amino acid
  VARIANT 69: note = Any amino acid
  VARIANT 70: note = Any amino acid
  VARIANT 71: note = Any amino acid
  VARIANT 72: note = Any amino acid
  VARIANT 73: note = Any amino acid
  VARIANT 74: note = Any amino acid
  VARIANT 75: note = Any amino acid
  VARIANT 76: note = Any amino acid
  VARIANT 77: note = Any amino acid
  VARIANT 78: note = Any amino acid
  VARIANT 79: note = Any amino acid
  VARIANT 80: note = Any amino acid
  VARIANT 81: note = Any amino acid
  VARIANT 82: note = Any amino acid
  VARIANT 83: note = Any amino acid
  VARIANT 84: note = Any amino acid
  VARIANT 85: note = Any amino acid
  VARIANT 86: note = Any amino acid
  VARIANT 87: note = Any amino acid
  VARIANT 88: note = Any amino acid
  VARIANT 89: note = Any amino acid
  VARIANT 90: note = Any amino acid
  VARIANT 91: note = Any amino acid
  VARIANT 92: note = Any amino acid
  VARIANT 93: note = Any amino acid
  VARIANT 94: note = Any amino acid
  VARIANT 95: note = Any amino acid
  VARIANT 97: note = Any amino acid
  VARIANT 99: note = Any amino acid
  VARIANT 100: note = Any amino acid
DXXXXXXXXXXXXXXXXXXXXXXXXXXXXXXXXXXXXXXXXXXXXXXXXXXXXXEXXXXXXXXXXXXXXXXXXXXXXXXXXXXXXXXXXXXXXXXRXDXXD

SEQ ID NO: 795743 - protein, 100 aa, unidentified
  VARIANT 2: note = Any amino acid
  VARIANT 3: note = Any amino acid
  VARIANT 4: note = Any amino acid
  VARIANT 5: note = Any amino acid
  VARIANT 6: note = Any amino acid
  VARIANT 7: note = Any amino acid
  VARIANT 8: note = Any amino acid
  VARIANT 9: note = Any amino acid
  VARIANT 10: note = Any amino acid
  VARIANT 11: note = Any amino acid
  VARIANT 12: note = Any amino acid
  VARIANT 13: note = Any amino acid
  VARIANT 14: note = Any amino acid
  VARIANT 15: note = Any amino acid
  VARIANT 16: note = Any amino acid
  VARIANT 17: note = Any amino acid
  VARIANT 18: note = Any amino acid
  VARIANT 19: note = Any amino acid
  VARIANT 20: note = Any amino acid
  VARIANT 21: note = Any amino acid
  VARIANT 22: note = Any amino acid
  VARIANT 23: note = Any amino acid
  VARIANT 24: note = Any amino acid
  VARIANT 25: note = Any amino acid
  VARIANT 26: note = Any amino acid
  VARIANT 27: note = Any amino acid
  VARIANT 28: note = Any amino acid
  VARIANT 29: note = Any amino acid
  VARIANT 30: note = Any amino acid
  VARIANT 31: note = Any amino acid
  VARIANT 32: note = Any amino acid
  VARIANT 33: note = Any amino acid
  VARIANT 34: note = Any amino acid
  VARIANT 35: note = Any amino acid
  VARIANT 36: note = Any amino acid
  VARIANT 37: note = Any amino acid
  VARIANT 38: note = Any amino acid
  VARIANT 39: note = Any amino acid
  VARIANT 40: note = Any amino acid
  VARIANT 41: note = Any amino acid
  VARIANT 42: note = Any amino acid
  VARIANT 43: note = Any amino acid
  VARIANT 44: note = Any amino acid
  VARIANT 45: note = Any amino acid
  VARIANT 46: note = Any amino acid
  VARIANT 47: note = Any amino acid
  VARIANT 48: note = Any amino acid
  VARIANT 49: note = Any amino acid
  VARIANT 50: note = Any amino acid
  VARIANT 51: note = Any amino acid
  VARIANT 52: note = Any amino acid
  VARIANT 53: note = Any amino acid
  VARIANT 54: note = Any amino acid
  VARIANT 55: note = Any amino acid
  VARIANT 57: note = Any amino acid
  VARIANT 58: note = Any amino acid
  VARIANT 59: note = Any amino acid
  VARIANT 60: note = Any amino acid
  VARIANT 61: note = Any amino acid
  VARIANT 62: note = Any amino acid
  VARIANT 63: note = Any amino acid
  VARIANT 64: note = Any amino acid
  VARIANT 65: note = Any amino acid
  VARIANT 66: note = Any amino acid
  VARIANT 67: note = Any amino acid
  VARIANT 68: note = Any amino acid
  VARIANT 69: note = Any amino acid
  VARIANT 70: note = Any amino acid
  VARIANT 71: note = Any amino acid
  VARIANT 72: note = Any amino acid
  VARIANT 73: note = Any amino acid
  VARIANT 74: note = Any amino acid
  VARIANT 75: note = Any amino acid
  VARIANT 76: note = Any amino acid
  VARIANT 77: note = Any amino acid
  VARIANT 78: note = Any amino acid
  VARIANT 79: note = Any amino acid
  VARIANT 80: note = Any amino acid
  VARIANT 81: note = Any amino acid
  VARIANT 82: note = Any amino acid
  VARIANT 83: note = Any amino acid
  VARIANT 84: note = Any amino acid
  VARIANT 85: note = Any amino acid
  VARIANT 86: note = Any amino acid
  VARIANT 87: note = Any amino acid
  VARIANT 88: note = Any amino acid
  VARIANT 89: note = Any amino acid
  VARIANT 90: note = Any amino acid
  VARIANT 91: note = Any amino acid
  VARIANT 92: note = Any amino acid
  VARIANT 93: note = Any amino acid
  VARIANT 94: note = Any amino acid
  VARIANT 96: note = Any amino acid
  VARIANT 98: note = Any amino acid
  VARIANT 99: note = Any amino acid
DXXXXXXXXXXXXXXXXXXXXXXXXXXXXXXXXXXXXXXXXXXXXXXXXXXXXXXEXXXXXXXXXXXXXXXXXXXXXXXXXXXXXXXXXXXXXXKXDXXD

SEQ ID NO: 795744 - protein, 105 aa, unidentified
  VARIANT 2: note = Any amino acid
  VARIANT 3: note = Any amino acid
  VARIANT 4: note = Any amino acid
  VARIANT 5: note = Any amino acid
  VARIANT 6: note = Any amino acid
  VARIANT 7: note = Any amino acid
  VARIANT 8: note = Any amino acid
  VARIANT 9: note = Any amino acid
  VARIANT 10: note = Any amino acid
  VARIANT 11: note = Any amino acid
  VARIANT 12: note = Any amino acid
  VARIANT 13: note = Any amino acid
  VARIANT 14: note = Any amino acid
  VARIANT 15: note = Any amino acid
  VARIANT 16: note = Any amino acid
  VARIANT 17: note = Any amino acid
  VARIANT 18: note = Any amino acid
  VARIANT 19: note = Any amino acid
  VARIANT 20: note = Any amino acid
  VARIANT 21: note = Any amino acid
  VARIANT 22: note = Any amino acid
  VARIANT 23: note = Any amino acid
  VARIANT 24: note = Any amino acid
  VARIANT 25: note = Any amino acid
  VARIANT 26: note = Any amino acid
  VARIANT 27: note = Any amino acid
  VARIANT 28: note = Any amino acid
  VARIANT 29: note = Any amino acid
  VARIANT 30: note = Any amino acid
  VARIANT 31: note = Any amino acid
  VARIANT 32: note = Any amino acid
  VARIANT 33: note = Any amino acid
  VARIANT 34: note = Any amino acid
  VARIANT 35: note = Any amino acid
  VARIANT 36: note = Any amino acid
  VARIANT 37: note = Any amino acid
  VARIANT 38: note = Any amino acid
  VARIANT 39: note = Any amino acid
  VARIANT 40: note = Any amino acid
  VARIANT 41: note = Any amino acid
  VARIANT 42: note = Any amino acid
  VARIANT 43: note = Any amino acid
  VARIANT 44: note = Any amino acid
  VARIANT 45: note = Any amino acid
  VARIANT 46: note = Any amino acid
  VARIANT 47: note = Any amino acid
  VARIANT 48: note = Any amino acid
  VARIANT 49: note = Any amino acid
  VARIANT 50: note = Any amino acid
  VARIANT 51: note = Any amino acid
  VARIANT 52: note = Any amino acid
  VARIANT 53: note = Any amino acid
  VARIANT 54: note = Any amino acid
  VARIANT 55: note = Any amino acid
  VARIANT 56: note = Any amino acid
  VARIANT 57: note = Any amino acid
  VARIANT 59: note = Any amino acid
  VARIANT 60: note = Any amino acid
  VARIANT 61: note = Any amino acid
  VARIANT 62: note = Any amino acid
  VARIANT 63: note = Any amino acid
  VARIANT 64: note = Any amino acid
  VARIANT 65: note = Any amino acid
  VARIANT 66: note = Any amino acid
  VARIANT 67: note = Any amino acid
  VARIANT 68: note = Any amino acid
  VARIANT 69: note = Any amino acid
  VARIANT 70: note = Any amino acid
  VARIANT 71: note = Any amino acid
  VARIANT 72: note = Any amino acid
  VARIANT 73: note = Any amino acid
  VARIANT 74: note = Any amino acid
  VARIANT 75: note = Any amino acid
  VARIANT 76: note = Any amino acid
  VARIANT 77: note = Any amino acid
  VARIANT 78: note = Any amino acid
  VARIANT 79: note = Any amino acid
  VARIANT 80: note = Any amino acid
  VARIANT 81: note = Any amino acid
  VARIANT 82: note = Any amino acid
  VARIANT 83: note = Any amino acid
  VARIANT 84: note = Any amino acid
  VARIANT 85: note = Any amino acid
  VARIANT 86: note = Any amino acid
  VARIANT 87: note = Any amino acid
  VARIANT 88: note = Any amino acid
  VARIANT 89: note = Any amino acid
  VARIANT 90: note = Any amino acid
  VARIANT 91: note = Any amino acid
  VARIANT 92: note = Any amino acid
  VARIANT 93: note = Any amino acid
  VARIANT 94: note = Any amino acid
  VARIANT 95: note = Any amino acid
  VARIANT 96: note = Any amino acid
  VARIANT 97: note = Any amino acid
  VARIANT 98: note = Any amino acid
  VARIANT 99: note = Any amino acid
  VARIANT 101: note = Any amino acid
  VARIANT 103: note = Any amino acid
  VARIANT 104: note = Any amino acid
DXXXXXXXXXXXXXXXXXXXXXXXXXXXXXXXXXXXXXXXXXXXXXXXXXXXXXXXXEXXXXXXXXXXXXXXXXXXXXXXXXXXXXXXXXXXXXXXXXXKXDXXD

SEQ ID NO: 795745 - protein, 94 aa, unidentified
  VARIANT 2: note = Any amino acid
  VARIANT 3: note = Any amino acid
  VARIANT 4: note = Any amino acid
  VARIANT 5: note = Any amino acid
  VARIANT 6: note = Any amino acid
  VARIANT 7: note = Any amino acid
  VARIANT 8: note = Any amino acid
  VARIANT 9: note = Any amino acid
  VARIANT 10: note = Any amino acid
  VARIANT 11: note = Any amino acid
  VARIANT 12: note = Any amino acid
  VARIANT 13: note = Any amino acid
  VARIANT 14: note = Any amino acid
  VARIANT 15: note = Any amino acid
  VARIANT 16: note = Any amino acid
  VARIANT 17: note = Any amino acid
  VARIANT 18: note = Any amino acid
  VARIANT 19: note = Any amino acid
  VARIANT 20: note = Any amino acid
  VARIANT 21: note = Any amino acid
  VARIANT 22: note = Any amino acid
  VARIANT 23: note = Any amino acid
  VARIANT 24: note = Any amino acid
  VARIANT 25: note = Any amino acid
  VARIANT 26: note = Any amino acid
  VARIANT 27: note = Any amino acid
  VARIANT 28: note = Any amino acid
  VARIANT 29: note = Any amino acid
  VARIANT 30: note = Any amino acid
  VARIANT 31: note = Any amino acid
  VARIANT 32: note = Any amino acid
  VARIANT 33: note = Any amino acid
  VARIANT 34: note = Any amino acid
  VARIANT 35: note = Any amino acid
  VARIANT 36: note = Any amino acid
  VARIANT 37: note = Any amino acid
  VARIANT 38: note = Any amino acid
  VARIANT 39: note = Any amino acid
  VARIANT 40: note = Any amino acid
  VARIANT 41: note = Any amino acid
  VARIANT 42: note = Any amino acid
  VARIANT 43: note = Any amino acid
  VARIANT 44: note = Any amino acid
  VARIANT 45: note = Any amino acid
  VARIANT 46: note = Any amino acid
  VARIANT 47: note = Any amino acid
  VARIANT 48: note = Any amino acid
  VARIANT 49: note = Any amino acid
  VARIANT 51: note = Any amino acid
  VARIANT 52: note = Any amino acid
  VARIANT 53: note = Any amino acid
  VARIANT 54: note = Any amino acid
  VARIANT 55: note = Any amino acid
  VARIANT 56: note = Any amino acid
  VARIANT 57: note = Any amino acid
  VARIANT 58: note = Any amino acid
  VARIANT 59: note = Any amino acid
  VARIANT 60: note = Any amino acid
  VARIANT 61: note = Any amino acid
  VARIANT 62: note = Any amino acid
  VARIANT 63: note = Any amino acid
  VARIANT 64: note = Any amino acid
  VARIANT 65: note = Any amino acid
  VARIANT 66: note = Any amino acid
  VARIANT 67: note = Any amino acid
  VARIANT 68: note = Any amino acid
  VARIANT 69: note = Any amino acid
  VARIANT 70: note = Any amino acid
  VARIANT 71: note = Any amino acid
  VARIANT 72: note = Any amino acid
  VARIANT 73: note = Any amino acid
  VARIANT 74: note = Any amino acid
  VARIANT 75: note = Any amino acid
  VARIANT 76: note = Any amino acid
  VARIANT 77: note = Any amino acid
  VARIANT 78: note = Any amino acid
  VARIANT 79: note = Any amino acid
  VARIANT 80: note = Any amino acid
  VARIANT 81: note = Any amino acid
  VARIANT 82: note = Any amino acid
  VARIANT 83: note = Any amino acid
  VARIANT 84: note = Any amino acid
  VARIANT 85: note = Any amino acid
  VARIANT 86: note = Any amino acid
  VARIANT 87: note = Any amino acid
  VARIANT 88: note = Any amino acid
  VARIANT 90: note = Any amino acid
  VARIANT 92: note = Any amino acid
  VARIANT 93: note = Any amino acid
DXXXXXXXXXXXXXXXXXXXXXXXXXXXXXXXXXXXXXXXXXXXXXXXXDXXXXXXXXXXXXXXXXXXXXXXXXXXXXXXXXXXXXXXKXDXXD

SEQ ID NO: 795746 - protein, 102 aa, unidentified
  VARIANT 2: note = Any amino acid
  VARIANT 3: note = Any amino acid
  VARIANT 4: note = Any amino acid
  VARIANT 5: note = Any amino acid
  VARIANT 6: note = Any amino acid
  VARIANT 7: note = Any amino acid
  VARIANT 8: note = Any amino acid
  VARIANT 9: note = Any amino acid
  VARIANT 10: note = Any amino acid
  VARIANT 11: note = Any amino acid
  VARIANT 12: note = Any amino acid
  VARIANT 13: note = Any amino acid
  VARIANT 14: note = Any amino acid
  VARIANT 15: note = Any amino acid
  VARIANT 16: note = Any amino acid
  VARIANT 17: note = Any amino acid
  VARIANT 18: note = Any amino acid
  VARIANT 19: note = Any amino acid
  VARIANT 20: note = Any amino acid
  VARIANT 21: note = Any amino acid
  VARIANT 22: note = Any amino acid
  VARIANT 23: note = Any amino acid
  VARIANT 24: note = Any amino acid
  VARIANT 25: note = Any amino acid
  VARIANT 26: note = Any amino acid
  VARIANT 27: note = Any amino acid
  VARIANT 28: note = Any amino acid
  VARIANT 29: note = Any amino acid
  VARIANT 30: note = Any amino acid
  VARIANT 31: note = Any amino acid
  VARIANT 32: note = Any amino acid
  VARIANT 33: note = Any amino acid
  VARIANT 34: note = Any amino acid
  VARIANT 35: note = Any amino acid
  VARIANT 36: note = Any amino acid
  VARIANT 37: note = Any amino acid
  VARIANT 38: note = Any amino acid
  VARIANT 39: note = Any amino acid
  VARIANT 40: note = Any amino acid
  VARIANT 41: note = Any amino acid
  VARIANT 42: note = Any amino acid
  VARIANT 43: note = Any amino acid
  VARIANT 44: note = Any amino acid
  VARIANT 45: note = Any amino acid
  VARIANT 46: note = Any amino acid
  VARIANT 47: note = Any amino acid
  VARIANT 48: note = Any amino acid
  VARIANT 49: note = Any amino acid
  VARIANT 50: note = Any amino acid
  VARIANT 51: note = Any amino acid
  VARIANT 52: note = Any amino acid
  VARIANT 53: note = Any amino acid
  VARIANT 54: note = Any amino acid
  VARIANT 55: note = Any amino acid
  VARIANT 57: note = Any amino acid
  VARIANT 58: note = Any amino acid
  VARIANT 59: note = Any amino acid
  VARIANT 60: note = Any amino acid
  VARIANT 61: note = Any amino acid
  VARIANT 62: note = Any amino acid
  VARIANT 63: note = Any amino acid
  VARIANT 64: note = Any amino acid
  VARIANT 65: note = Any amino acid
  VARIANT 66: note = Any amino acid
  VARIANT 67: note = Any amino acid
  VARIANT 68: note = Any amino acid
  VARIANT 69: note = Any amino acid
  VARIANT 70: note = Any amino acid
  VARIANT 71: note = Any amino acid
  VARIANT 72: note = Any amino acid
  VARIANT 73: note = Any amino acid
  VARIANT 74: note = Any amino acid
  VARIANT 75: note = Any amino acid
  VARIANT 76: note = Any amino acid
  VARIANT 77: note = Any amino acid
  VARIANT 78: note = Any amino acid
  VARIANT 79: note = Any amino acid
  VARIANT 80: note = Any amino acid
  VARIANT 81: note = Any amino acid
  VARIANT 82: note = Any amino acid
  VARIANT 83: note = Any amino acid
  VARIANT 84: note = Any amino acid
  VARIANT 85: note = Any amino acid
  VARIANT 86: note = Any amino acid
  VARIANT 87: note = Any amino acid
  VARIANT 88: note = Any amino acid
  VARIANT 89: note = Any amino acid
  VARIANT 90: note = Any amino acid
  VARIANT 91: note = Any amino acid
  VARIANT 92: note = Any amino acid
  VARIANT 93: note = Any amino acid
  VARIANT 94: note = Any amino acid
  VARIANT 95: note = Any amino acid
  VARIANT 96: note = Any amino acid
  VARIANT 98: note = Any amino acid
  VARIANT 100: note = Any amino acid
  VARIANT 101: note = Any amino acid
DXXXXXXXXXXXXXXXXXXXXXXXXXXXXXXXXXXXXXXXXXXXXXXXXXXXXXXEXXXXXXXXXXXXXXXXXXXXXXXXXXXXXXXXXXXXXXXXRXDXXD

SEQ ID NO: 795747 - protein, 93 aa, unidentified
  VARIANT 2: note = Any amino acid
  VARIANT 3: note = Any amino acid
  VARIANT 4: note = Any amino acid
  VARIANT 5: note = Any amino acid
  VARIANT 6: note = Any amino acid
  VARIANT 7: note = Any amino acid
  VARIANT 8: note = Any amino acid
  VARIANT 9: note = Any amino acid
  VARIANT 10: note = Any amino acid
  VARIANT 11: note = Any amino acid
  VARIANT 12: note = Any amino acid
  VARIANT 13: note = Any amino acid
  VARIANT 14: note = Any amino acid
  VARIANT 15: note = Any amino acid
  VARIANT 16: note = Any amino acid
  VARIANT 17: note = Any amino acid
  VARIANT 18: note = Any amino acid
  VARIANT 19: note = Any amino acid
  VARIANT 20: note = Any amino acid
  VARIANT 21: note = Any amino acid
  VARIANT 22: note = Any amino acid
  VARIANT 23: note = Any amino acid
  VARIANT 24: note = Any amino acid
  VARIANT 25: note = Any amino acid
  VARIANT 26: note = Any amino acid
  VARIANT 27: note = Any amino acid
  VARIANT 28: note = Any amino acid
  VARIANT 29: note = Any amino acid
  VARIANT 30: note = Any amino acid
  VARIANT 31: note = Any amino acid
  VARIANT 32: note = Any amino acid
  VARIANT 33: note = Any amino acid
  VARIANT 34: note = Any amino acid
  VARIANT 35: note = Any amino acid
  VARIANT 36: note = Any amino acid
  VARIANT 37: note = Any amino acid
  VARIANT 38: note = Any amino acid
  VARIANT 39: note = Any amino acid
  VARIANT 40: note = Any amino acid
  VARIANT 41: note = Any amino acid
  VARIANT 42: note = Any amino acid
  VARIANT 43: note = Any amino acid
  VARIANT 44: note = Any amino acid
  VARIANT 45: note = Any amino acid
  VARIANT 46: note = Any amino acid
  VARIANT 47: note = Any amino acid
  VARIANT 49: note = Any amino acid
  VARIANT 50: note = Any amino acid
  VARIANT 51: note = Any amino acid
  VARIANT 52: note = Any amino acid
  VARIANT 53: note = Any amino acid
  VARIANT 54: note = Any amino acid
  VARIANT 55: note = Any amino acid
  VARIANT 56: note = Any amino acid
  VARIANT 57: note = Any amino acid
  VARIANT 58: note = Any amino acid
  VARIANT 59: note = Any amino acid
  VARIANT 60: note = Any amino acid
  VARIANT 61: note = Any amino acid
  VARIANT 62: note = Any amino acid
  VARIANT 63: note = Any amino acid
  VARIANT 64: note = Any amino acid
  VARIANT 65: note = Any amino acid
  VARIANT 66: note = Any amino acid
  VARIANT 67: note = Any amino acid
  VARIANT 68: note = Any amino acid
  VARIANT 69: note = Any amino acid
  VARIANT 70: note = Any amino acid
  VARIANT 71: note = Any amino acid
  VARIANT 72: note = Any amino acid
  VARIANT 73: note = Any amino acid
  VARIANT 74: note = Any amino acid
  VARIANT 75: note = Any amino acid
  VARIANT 76: note = Any amino acid
  VARIANT 77: note = Any amino acid
  VARIANT 78: note = Any amino acid
  VARIANT 79: note = Any amino acid
  VARIANT 80: note = Any amino acid
  VARIANT 81: note = Any amino acid
  VARIANT 82: note = Any amino acid
  VARIANT 83: note = Any amino acid
  VARIANT 84: note = Any amino acid
  VARIANT 85: note = Any amino acid
  VARIANT 86: note = Any amino acid
  VARIANT 87: note = Any amino acid
  VARIANT 89: note = Any amino acid
  VARIANT 91: note = Any amino acid
  VARIANT 92: note = Any amino acid
DXXXXXXXXXXXXXXXXXXXXXXXXXXXXXXXXXXXXXXXXXXXXXXAXXXXXXXXXXXXXXXXXXXXXXXXXXXXXXXXXXXXXXXKXDXXD

SEQ ID NO: 795748 - protein, 101 aa, unidentified
  VARIANT 2: note = Any amino acid
  VARIANT 3: note = Any amino acid
  VARIANT 4: note = Any amino acid
  VARIANT 5: note = Any amino acid
  VARIANT 6: note = Any amino acid
  VARIANT 7: note = Any amino acid
  VARIANT 8: note = Any amino acid
  VARIANT 9: note = Any amino acid
  VARIANT 10: note = Any amino acid
  VARIANT 11: note = Any amino acid
  VARIANT 12: note = Any amino acid
  VARIANT 13: note = Any amino acid
  VARIANT 14: note = Any amino acid
  VARIANT 15: note = Any amino acid
  VARIANT 16: note = Any amino acid
  VARIANT 17: note = Any amino acid
  VARIANT 18: note = Any amino acid
  VARIANT 19: note = Any amino acid
  VARIANT 20: note = Any amino acid
  VARIANT 21: note = Any amino acid
  VARIANT 22: note = Any amino acid
  VARIANT 23: note = Any amino acid
  VARIANT 24: note = Any amino acid
  VARIANT 25: note = Any amino acid
  VARIANT 26: note = Any amino acid
  VARIANT 27: note = Any amino acid
  VARIANT 28: note = Any amino acid
  VARIANT 29: note = Any amino acid
  VARIANT 30: note = Any amino acid
  VARIANT 31: note = Any amino acid
  VARIANT 32: note = Any amino acid
  VARIANT 33: note = Any amino acid
  VARIANT 34: note = Any amino acid
  VARIANT 35: note = Any amino acid
  VARIANT 36: note = Any amino acid
  VARIANT 37: note = Any amino acid
  VARIANT 38: note = Any amino acid
  VARIANT 39: note = Any amino acid
  VARIANT 40: note = Any amino acid
  VARIANT 41: note = Any amino acid
  VARIANT 42: note = Any amino acid
  VARIANT 43: note = Any amino acid
  VARIANT 44: note = Any amino acid
  VARIANT 45: note = Any amino acid
  VARIANT 46: note = Any amino acid
  VARIANT 47: note = Any amino acid
  VARIANT 48: note = Any amino acid
  VARIANT 49: note = Any amino acid
  VARIANT 50: note = Any amino acid
  VARIANT 51: note = Any amino acid
  VARIANT 52: note = Any amino acid
  VARIANT 53: note = Any amino acid
  VARIANT 54: note = Any amino acid
  VARIANT 55: note = Any amino acid
  VARIANT 57: note = Any amino acid
  VARIANT 58: note = Any amino acid
  VARIANT 59: note = Any amino acid
  VARIANT 60: note = Any amino acid
  VARIANT 61: note = Any amino acid
  VARIANT 62: note = Any amino acid
  VARIANT 63: note = Any amino acid
  VARIANT 64: note = Any amino acid
  VARIANT 65: note = Any amino acid
  VARIANT 66: note = Any amino acid
  VARIANT 67: note = Any amino acid
  VARIANT 68: note = Any amino acid
  VARIANT 69: note = Any amino acid
  VARIANT 70: note = Any amino acid
  VARIANT 71: note = Any amino acid
  VARIANT 72: note = Any amino acid
  VARIANT 73: note = Any amino acid
  VARIANT 74: note = Any amino acid
  VARIANT 75: note = Any amino acid
  VARIANT 76: note = Any amino acid
  VARIANT 77: note = Any amino acid
  VARIANT 78: note = Any amino acid
  VARIANT 79: note = Any amino acid
  VARIANT 80: note = Any amino acid
  VARIANT 81: note = Any amino acid
  VARIANT 82: note = Any amino acid
  VARIANT 83: note = Any amino acid
  VARIANT 84: note = Any amino acid
  VARIANT 85: note = Any amino acid
  VARIANT 86: note = Any amino acid
  VARIANT 87: note = Any amino acid
  VARIANT 88: note = Any amino acid
  VARIANT 89: note = Any amino acid
  VARIANT 90: note = Any amino acid
  VARIANT 91: note = Any amino acid
  VARIANT 92: note = Any amino acid
  VARIANT 93: note = Any amino acid
  VARIANT 94: note = Any amino acid
  VARIANT 95: note = Any amino acid
  VARIANT 97: note = Any amino acid
  VARIANT 99: note = Any amino acid
  VARIANT 100: note = Any amino acid
DXXXXXXXXXXXXXXXXXXXXXXXXXXXXXXXXXXXXXXXXXXXXXXXXXXXXXXGXXXXXXXXXXXXXXXXXXXXXXXXXXXXXXXXXXXXXXXKXDXXD

SEQ ID NO: 795749 - protein, 94 aa, unidentified
  VARIANT 2: note = Any amino acid
  VARIANT 3: note = Any amino acid
  VARIANT 4: note = Any amino acid
  VARIANT 5: note = Any amino acid
  VARIANT 6: note = Any amino acid
  VARIANT 7: note = Any amino acid
  VARIANT 8: note = Any amino acid
  VARIANT 9: note = Any amino acid
  VARIANT 10: note = Any amino acid
  VARIANT 11: note = Any amino acid
  VARIANT 12: note = Any amino acid
  VARIANT 13: note = Any amino acid
  VARIANT 14: note = Any amino acid
  VARIANT 15: note = Any amino acid
  VARIANT 16: note = Any amino acid
  VARIANT 17: note = Any amino acid
  VARIANT 18: note = Any amino acid
  VARIANT 19: note = Any amino acid
  VARIANT 20: note = Any amino acid
  VARIANT 21: note = Any amino acid
  VARIANT 22: note = Any amino acid
  VARIANT 23: note = Any amino acid
  VARIANT 24: note = Any amino acid
  VARIANT 25: note = Any amino acid
  VARIANT 26: note = Any amino acid
  VARIANT 27: note = Any amino acid
  VARIANT 28: note = Any amino acid
  VARIANT 29: note = Any amino acid
  VARIANT 30: note = Any amino acid
  VARIANT 31: note = Any amino acid
  VARIANT 32: note = Any amino acid
  VARIANT 33: note = Any amino acid
  VARIANT 34: note = Any amino acid
  VARIANT 35: note = Any amino acid
  VARIANT 36: note = Any amino acid
  VARIANT 37: note = Any amino acid
  VARIANT 38: note = Any amino acid
  VARIANT 39: note = Any amino acid
  VARIANT 40: note = Any amino acid
  VARIANT 41: note = Any amino acid
  VARIANT 42: note = Any amino acid
  VARIANT 43: note = Any amino acid
  VARIANT 44: note = Any amino acid
  VARIANT 45: note = Any amino acid
  VARIANT 46: note = Any amino acid
  VARIANT 48: note = Any amino acid
  VARIANT 49: note = Any amino acid
  VARIANT 50: note = Any amino acid
  VARIANT 51: note = Any amino acid
  VARIANT 52: note = Any amino acid
  VARIANT 53: note = Any amino acid
  VARIANT 54: note = Any amino acid
  VARIANT 55: note = Any amino acid
  VARIANT 56: note = Any amino acid
  VARIANT 57: note = Any amino acid
  VARIANT 58: note = Any amino acid
  VARIANT 59: note = Any amino acid
  VARIANT 60: note = Any amino acid
  VARIANT 61: note = Any amino acid
  VARIANT 62: note = Any amino acid
  VARIANT 63: note = Any amino acid
  VARIANT 64: note = Any amino acid
  VARIANT 65: note = Any amino acid
  VARIANT 66: note = Any amino acid
  VARIANT 67: note = Any amino acid
  VARIANT 68: note = Any amino acid
  VARIANT 69: note = Any amino acid
  VARIANT 70: note = Any amino acid
  VARIANT 71: note = Any amino acid
  VARIANT 72: note = Any amino acid
  VARIANT 73: note = Any amino acid
  VARIANT 74: note = Any amino acid
  VARIANT 75: note = Any amino acid
  VARIANT 76: note = Any amino acid
  VARIANT 77: note = Any amino acid
  VARIANT 78: note = Any amino acid
  VARIANT 79: note = Any amino acid
  VARIANT 80: note = Any amino acid
  VARIANT 81: note = Any amino acid
  VARIANT 82: note = Any amino acid
  VARIANT 83: note = Any amino acid
  VARIANT 84: note = Any amino acid
  VARIANT 85: note = Any amino acid
  VARIANT 86: note = Any amino acid
  VARIANT 87: note = Any amino acid
  VARIANT 88: note = Any amino acid
  VARIANT 90: note = Any amino acid
  VARIANT 92: note = Any amino acid
  VARIANT 93: note = Any amino acid
DXXXXXXXXXXXXXXXXXXXXXXXXXXXXXXXXXXXXXXXXXXXXXEXXXXXXXXXXXXXXXXXXXXXXXXXXXXXXXXXXXXXXXXXKXDXXD

SEQ ID NO: 795750 - protein, 98 aa, unidentified
  VARIANT 2: note = Any amino acid
  VARIANT 3: note = Any amino acid
  VARIANT 4: note = Any amino acid
  VARIANT 5: note = Any amino acid
  VARIANT 6: note = Any amino acid
  VARIANT 7: note = Any amino acid
  VARIANT 8: note = Any amino acid
  VARIANT 9: note = Any amino acid
  VARIANT 10: note = Any amino acid
  VARIANT 11: note = Any amino acid
  VARIANT 12: note = Any amino acid
  VARIANT 13: note = Any amino acid
  VARIANT 14: note = Any amino acid
  VARIANT 15: note = Any amino acid
  VARIANT 16: note = Any amino acid
  VARIANT 17: note = Any amino acid
  VARIANT 18: note = Any amino acid
  VARIANT 19: note = Any amino acid
  VARIANT 20: note = Any amino acid
  VARIANT 21: note = Any amino acid
  VARIANT 22: note = Any amino acid
  VARIANT 23: note = Any amino acid
  VARIANT 24: note = Any amino acid
  VARIANT 25: note = Any amino acid
  VARIANT 26: note = Any amino acid
  VARIANT 27: note = Any amino acid
  VARIANT 28: note = Any amino acid
  VARIANT 29: note = Any amino acid
  VARIANT 30: note = Any amino acid
  VARIANT 31: note = Any amino acid
  VARIANT 32: note = Any amino acid
  VARIANT 33: note = Any amino acid
  VARIANT 34: note = Any amino acid
  VARIANT 35: note = Any amino acid
  VARIANT 36: note = Any amino acid
  VARIANT 37: note = Any amino acid
  VARIANT 38: note = Any amino acid
  VARIANT 39: note = Any amino acid
  VARIANT 40: note = Any amino acid
  VARIANT 41: note = Any amino acid
  VARIANT 42: note = Any amino acid
  VARIANT 43: note = Any amino acid
  VARIANT 44: note = Any amino acid
  VARIANT 45: note = Any amino acid
  VARIANT 46: note = Any amino acid
  VARIANT 47: note = Any amino acid
  VARIANT 48: note = Any amino acid
  VARIANT 49: note = Any amino acid
  VARIANT 50: note = Any amino acid
  VARIANT 51: note = Any amino acid
  VARIANT 53: note = Any amino acid
  VARIANT 54: note = Any amino acid
  VARIANT 55: note = Any amino acid
  VARIANT 56: note = Any amino acid
  VARIANT 57: note = Any amino acid
  VARIANT 58: note = Any amino acid
  VARIANT 59: note = Any amino acid
  VARIANT 60: note = Any amino acid
  VARIANT 61: note = Any amino acid
  VARIANT 62: note = Any amino acid
  VARIANT 63: note = Any amino acid
  VARIANT 64: note = Any amino acid
  VARIANT 65: note = Any amino acid
  VARIANT 66: note = Any amino acid
  VARIANT 67: note = Any amino acid
  VARIANT 68: note = Any amino acid
  VARIANT 69: note = Any amino acid
  VARIANT 70: note = Any amino acid
  VARIANT 71: note = Any amino acid
  VARIANT 72: note = Any amino acid
  VARIANT 73: note = Any amino acid
  VARIANT 74: note = Any amino acid
  VARIANT 75: note = Any amino acid
  VARIANT 76: note = Any amino acid
  VARIANT 77: note = Any amino acid
  VARIANT 78: note = Any amino acid
  VARIANT 79: note = Any amino acid
  VARIANT 80: note = Any amino acid
  VARIANT 81: note = Any amino acid
  VARIANT 82: note = Any amino acid
  VARIANT 83: note = Any amino acid
  VARIANT 84: note = Any amino acid
  VARIANT 85: note = Any amino acid
  VARIANT 86: note = Any amino acid
  VARIANT 87: note = Any amino acid
  VARIANT 88: note = Any amino acid
  VARIANT 89: note = Any amino acid
  VARIANT 90: note = Any amino acid
  VARIANT 91: note = Any amino acid
  VARIANT 92: note = Any amino acid
  VARIANT 94: note = Any amino acid
  VARIANT 96: note = Any amino acid
  VARIANT 97: note = Any amino acid
DXXXXXXXXXXXXXXXXXXXXXXXXXXXXXXXXXXXXXXXXXXXXXXXXXXEXXXXXXXXXXXXXXXXXXXXXXXXXXXXXXXXXXXXXXXXMXDXXA

SEQ ID NO: 795751 - protein, 95 aa, unidentified
  VARIANT 2: note = Any amino acid
  VARIANT 3: note = Any amino acid
  VARIANT 4: note = Any amino acid
  VARIANT 5: note = Any amino acid
  VARIANT 6: note = Any amino acid
  VARIANT 7: note = Any amino acid
  VARIANT 8: note = Any amino acid
  VARIANT 9: note = Any amino acid
  VARIANT 10: note = Any amino acid
  VARIANT 11: note = Any amino acid
  VARIANT 12: note = Any amino acid
  VARIANT 13: note = Any amino acid
  VARIANT 14: note = Any amino acid
  VARIANT 15: note = Any amino acid
  VARIANT 16: note = Any amino acid
  VARIANT 17: note = Any amino acid
  VARIANT 18: note = Any amino acid
  VARIANT 19: note = Any amino acid
  VARIANT 20: note = Any amino acid
  VARIANT 21: note = Any amino acid
  VARIANT 22: note = Any amino acid
  VARIANT 23: note = Any amino acid
  VARIANT 24: note = Any amino acid
  VARIANT 25: note = Any amino acid
  VARIANT 26: note = Any amino acid
  VARIANT 27: note = Any amino acid
  VARIANT 28: note = Any amino acid
  VARIANT 29: note = Any amino acid
  VARIANT 30: note = Any amino acid
  VARIANT 31: note = Any amino acid
  VARIANT 32: note = Any amino acid
  VARIANT 33: note = Any amino acid
  VARIANT 34: note = Any amino acid
  VARIANT 35: note = Any amino acid
  VARIANT 36: note = Any amino acid
  VARIANT 37: note = Any amino acid
  VARIANT 38: note = Any amino acid
  VARIANT 39: note = Any amino acid
  VARIANT 40: note = Any amino acid
  VARIANT 41: note = Any amino acid
  VARIANT 42: note = Any amino acid
  VARIANT 43: note = Any amino acid
  VARIANT 44: note = Any amino acid
  VARIANT 45: note = Any amino acid
  VARIANT 46: note = Any amino acid
  VARIANT 47: note = Any amino acid
  VARIANT 48: note = Any amino acid
  VARIANT 49: note = Any amino acid
  VARIANT 50: note = Any amino acid
  VARIANT 51: note = Any amino acid
  VARIANT 52: note = Any amino acid
  VARIANT 54: note = Any amino acid
  VARIANT 55: note = Any amino acid
  VARIANT 56: note = Any amino acid
  VARIANT 57: note = Any amino acid
  VARIANT 58: note = Any amino acid
  VARIANT 59: note = Any amino acid
  VARIANT 60: note = Any amino acid
  VARIANT 61: note = Any amino acid
  VARIANT 62: note = Any amino acid
  VARIANT 63: note = Any amino acid
  VARIANT 64: note = Any amino acid
  VARIANT 65: note = Any amino acid
  VARIANT 66: note = Any amino acid
  VARIANT 67: note = Any amino acid
  VARIANT 68: note = Any amino acid
  VARIANT 69: note = Any amino acid
  VARIANT 70: note = Any amino acid
  VARIANT 71: note = Any amino acid
  VARIANT 72: note = Any amino acid
  VARIANT 73: note = Any amino acid
  VARIANT 74: note = Any amino acid
  VARIANT 75: note = Any amino acid
  VARIANT 76: note = Any amino acid
  VARIANT 77: note = Any amino acid
  VARIANT 78: note = Any amino acid
  VARIANT 79: note = Any amino acid
  VARIANT 80: note = Any amino acid
  VARIANT 81: note = Any amino acid
  VARIANT 82: note = Any amino acid
  VARIANT 83: note = Any amino acid
  VARIANT 84: note = Any amino acid
  VARIANT 85: note = Any amino acid
  VARIANT 86: note = Any amino acid
  VARIANT 87: note = Any amino acid
  VARIANT 88: note = Any amino acid
  VARIANT 89: note = Any amino acid
  VARIANT 91: note = Any amino acid
  VARIANT 93: note = Any amino acid
  VARIANT 94: note = Any amino acid
DXXXXXXXXXXXXXXXXXXXXXXXXXXXXXXXXXXXXXXXXXXXXXXXXXXXIXXXXXXXXXXXXXXXXXXXXXXXXXXXXXXXXXXXXKXDXXD

SEQ ID NO: 795752 - protein, 99 aa, unidentified
  VARIANT 2: note = Any amino acid
  VARIANT 3: note = Any amino acid
  VARIANT 4: note = Any amino acid
  VARIANT 5: note = Any amino acid
  VARIANT 6: note = Any amino acid
  VARIANT 7: note = Any amino acid
  VARIANT 8: note = Any amino acid
  VARIANT 9: note = Any amino acid
  VARIANT 10: note = Any amino acid
  VARIANT 11: note = Any amino acid
  VARIANT 12: note = Any amino acid
  VARIANT 13: note = Any amino acid
  VARIANT 14: note = Any amino acid
  VARIANT 15: note = Any amino acid
  VARIANT 16: note = Any amino acid
  VARIANT 17: note = Any amino acid
  VARIANT 18: note = Any amino acid
  VARIANT 19: note = Any amino acid
  VARIANT 20: note = Any amino acid
  VARIANT 21: note = Any amino acid
  VARIANT 22: note = Any amino acid
  VARIANT 23: note = Any amino acid
  VARIANT 24: note = Any amino acid
  VARIANT 25: note = Any amino acid
  VARIANT 26: note = Any amino acid
  VARIANT 27: note = Any amino acid
  VARIANT 28: note = Any amino acid
  VARIANT 29: note = Any amino acid
  VARIANT 30: note = Any amino acid
  VARIANT 31: note = Any amino acid
  VARIANT 32: note = Any amino acid
  VARIANT 33: note = Any amino acid
  VARIANT 34: note = Any amino acid
  VARIANT 35: note = Any amino acid
  VARIANT 36: note = Any amino acid
  VARIANT 37: note = Any amino acid
  VARIANT 38: note = Any amino acid
  VARIANT 39: note = Any amino acid
  VARIANT 40: note = Any amino acid
  VARIANT 41: note = Any amino acid
  VARIANT 42: note = Any amino acid
  VARIANT 43: note = Any amino acid
  VARIANT 44: note = Any amino acid
  VARIANT 45: note = Any amino acid
  VARIANT 46: note = Any amino acid
  VARIANT 47: note = Any amino acid
  VARIANT 48: note = Any amino acid
  VARIANT 49: note = Any amino acid
  VARIANT 50: note = Any amino acid
  VARIANT 51: note = Any amino acid
  VARIANT 52: note = Any amino acid
  VARIANT 53: note = Any amino acid
  VARIANT 55: note = Any amino acid
  VARIANT 56: note = Any amino acid
  VARIANT 57: note = Any amino acid
  VARIANT 58: note = Any amino acid
  VARIANT 59: note = Any amino acid
  VARIANT 60: note = Any amino acid
  VARIANT 61: note = Any amino acid
  VARIANT 62: note = Any amino acid
  VARIANT 63: note = Any amino acid
  VARIANT 64: note = Any amino acid
  VARIANT 65: note = Any amino acid
  VARIANT 66: note = Any amino acid
  VARIANT 67: note = Any amino acid
  VARIANT 68: note = Any amino acid
  VARIANT 69: note = Any amino acid
  VARIANT 70: note = Any amino acid
  VARIANT 71: note = Any amino acid
  VARIANT 72: note = Any amino acid
  VARIANT 73: note = Any amino acid
  VARIANT 74: note = Any amino acid
  VARIANT 75: note = Any amino acid
  VARIANT 76: note = Any amino acid
  VARIANT 77: note = Any amino acid
  VARIANT 78: note = Any amino acid
  VARIANT 79: note = Any amino acid
  VARIANT 80: note = Any amino acid
  VARIANT 81: note = Any amino acid
  VARIANT 82: note = Any amino acid
  VARIANT 83: note = Any amino acid
  VARIANT 84: note = Any amino acid
  VARIANT 85: note = Any amino acid
  VARIANT 86: note = Any amino acid
  VARIANT 87: note = Any amino acid
  VARIANT 88: note = Any amino acid
  VARIANT 89: note = Any amino acid
  VARIANT 90: note = Any amino acid
  VARIANT 91: note = Any amino acid
  VARIANT 92: note = Any amino acid
  VARIANT 93: note = Any amino acid
  VARIANT 95: note = Any amino acid
  VARIANT 97: note = Any amino acid
  VARIANT 98: note = Any amino acid
DXXXXXXXXXXXXXXXXXXXXXXXXXXXXXXXXXXXXXXXXXXXXXXXXXXXXCXXXXXXXXXXXXXXXXXXXXXXXXXXXXXXXXXXXXXXXKXDXXD

SEQ ID NO: 795753 - protein, 105 aa, unidentified
  VARIANT 2: note = Any amino acid
  VARIANT 3: note = Any amino acid
  VARIANT 4: note = Any amino acid
  VARIANT 5: note = Any amino acid
  VARIANT 6: note = Any amino acid
  VARIANT 7: note = Any amino acid
  VARIANT 8: note = Any amino acid
  VARIANT 9: note = Any amino acid
  VARIANT 10: note = Any amino acid
  VARIANT 11: note = Any amino acid
  VARIANT 12: note = Any amino acid
  VARIANT 13: note = Any amino acid
  VARIANT 14: note = Any amino acid
  VARIANT 15: note = Any amino acid
  VARIANT 16: note = Any amino acid
  VARIANT 17: note = Any amino acid
  VARIANT 18: note = Any amino acid
  VARIANT 19: note = Any amino acid
  VARIANT 20: note = Any amino acid
  VARIANT 21: note = Any amino acid
  VARIANT 22: note = Any amino acid
  VARIANT 23: note = Any amino acid
  VARIANT 24: note = Any amino acid
  VARIANT 25: note = Any amino acid
  VARIANT 26: note = Any amino acid
  VARIANT 27: note = Any amino acid
  VARIANT 28: note = Any amino acid
  VARIANT 29: note = Any amino acid
  VARIANT 30: note = Any amino acid
  VARIANT 31: note = Any amino acid
  VARIANT 32: note = Any amino acid
  VARIANT 33: note = Any amino acid
  VARIANT 34: note = Any amino acid
  VARIANT 35: note = Any amino acid
  VARIANT 36: note = Any amino acid
  VARIANT 37: note = Any amino acid
  VARIANT 38: note = Any amino acid
  VARIANT 39: note = Any amino acid
  VARIANT 40: note = Any amino acid
  VARIANT 41: note = Any amino acid
  VARIANT 42: note = Any amino acid
  VARIANT 43: note = Any amino acid
  VARIANT 44: note = Any amino acid
  VARIANT 45: note = Any amino acid
  VARIANT 46: note = Any amino acid
  VARIANT 47: note = Any amino acid
  VARIANT 48: note = Any amino acid
  VARIANT 49: note = Any amino acid
  VARIANT 50: note = Any amino acid
  VARIANT 51: note = Any amino acid
  VARIANT 52: note = Any amino acid
  VARIANT 53: note = Any amino acid
  VARIANT 54: note = Any amino acid
  VARIANT 55: note = Any amino acid
  VARIANT 56: note = Any amino acid
  VARIANT 57: note = Any amino acid
  VARIANT 58: note = Any amino acid
  VARIANT 59: note = Any amino acid
  VARIANT 61: note = Any amino acid
  VARIANT 62: note = Any amino acid
  VARIANT 63: note = Any amino acid
  VARIANT 64: note = Any amino acid
  VARIANT 65: note = Any amino acid
  VARIANT 66: note = Any amino acid
  VARIANT 67: note = Any amino acid
  VARIANT 68: note = Any amino acid
  VARIANT 69: note = Any amino acid
  VARIANT 70: note = Any amino acid
  VARIANT 71: note = Any amino acid
  VARIANT 72: note = Any amino acid
  VARIANT 73: note = Any amino acid
  VARIANT 74: note = Any amino acid
  VARIANT 75: note = Any amino acid
  VARIANT 76: note = Any amino acid
  VARIANT 77: note = Any amino acid
  VARIANT 78: note = Any amino acid
  VARIANT 79: note = Any amino acid
  VARIANT 80: note = Any amino acid
  VARIANT 81: note = Any amino acid
  VARIANT 82: note = Any amino acid
  VARIANT 83: note = Any amino acid
  VARIANT 84: note = Any amino acid
  VARIANT 85: note = Any amino acid
  VARIANT 86: note = Any amino acid
  VARIANT 87: note = Any amino acid
  VARIANT 88: note = Any amino acid
  VARIANT 89: note = Any amino acid
  VARIANT 90: note = Any amino acid
  VARIANT 91: note = Any amino acid
  VARIANT 92: note = Any amino acid
  VARIANT 93: note = Any amino acid
  VARIANT 94: note = Any amino acid
  VARIANT 95: note = Any amino acid
  VARIANT 96: note = Any amino acid
  VARIANT 97: note = Any amino acid
  VARIANT 98: note = Any amino acid
  VARIANT 99: note = Any amino acid
  VARIANT 101: note = Any amino acid
  VARIANT 103: note = Any amino acid
  VARIANT 104: note = Any amino acid
DXXXXXXXXXXXXXXXXXXXXXXXXXXXXXXXXXXXXXXXXXXXXXXXXXXXXXXXXXXEXXXXXXXXXXXXXXXXXXXXXXXXXXXXXXXXXXXXXXXKXDXXD

SEQ ID NO: 795754 - protein, 99 aa, unidentified
  VARIANT 2: note = Any amino acid
  VARIANT 3: note = Any amino acid
  VARIANT 4: note = Any amino acid
  VARIANT 5: note = Any amino acid
  VARIANT 6: note = Any amino acid
  VARIANT 7: note = Any amino acid
  VARIANT 8: note = Any amino acid
  VARIANT 9: note = Any amino acid
  VARIANT 10: note = Any amino acid
  VARIANT 11: note = Any amino acid
  VARIANT 12: note = Any amino acid
  VARIANT 13: note = Any amino acid
  VARIANT 14: note = Any amino acid
  VARIANT 15: note = Any amino acid
  VARIANT 16: note = Any amino acid
  VARIANT 17: note = Any amino acid
  VARIANT 18: note = Any amino acid
  VARIANT 19: note = Any amino acid
  VARIANT 20: note = Any amino acid
  VARIANT 21: note = Any amino acid
  VARIANT 22: note = Any amino acid
  VARIANT 23: note = Any amino acid
  VARIANT 24: note = Any amino acid
  VARIANT 25: note = Any amino acid
  VARIANT 26: note = Any amino acid
  VARIANT 27: note = Any amino acid
  VARIANT 28: note = Any amino acid
  VARIANT 29: note = Any amino acid
  VARIANT 30: note = Any amino acid
  VARIANT 31: note = Any amino acid
  VARIANT 32: note = Any amino acid
  VARIANT 33: note = Any amino acid
  VARIANT 34: note = Any amino acid
  VARIANT 35: note = Any amino acid
  VARIANT 36: note = Any amino acid
  VARIANT 37: note = Any amino acid
  VARIANT 38: note = Any amino acid
  VARIANT 39: note = Any amino acid
  VARIANT 40: note = Any amino acid
  VARIANT 41: note = Any amino acid
  VARIANT 42: note = Any amino acid
  VARIANT 43: note = Any amino acid
  VARIANT 44: note = Any amino acid
  VARIANT 45: note = Any amino acid
  VARIANT 46: note = Any amino acid
  VARIANT 47: note = Any amino acid
  VARIANT 48: note = Any amino acid
  VARIANT 49: note = Any amino acid
  VARIANT 50: note = Any amino acid
  VARIANT 51: note = Any amino acid
  VARIANT 52: note = Any amino acid
  VARIANT 53: note = Any amino acid
  VARIANT 54: note = Any amino acid
  VARIANT 55: note = Any amino acid
  VARIANT 56: note = Any amino acid
  VARIANT 57: note = Any amino acid
  VARIANT 58: note = Any amino acid
  VARIANT 59: note = Any amino acid
  VARIANT 60: note = Any amino acid
  VARIANT 61: note = Any amino acid
  VARIANT 62: note = Any amino acid
  VARIANT 64: note = Any amino acid
  VARIANT 65: note = Any amino acid
  VARIANT 66: note = Any amino acid
  VARIANT 67: note = Any amino acid
  VARIANT 68: note = Any amino acid
  VARIANT 69: note = Any amino acid
  VARIANT 70: note = Any amino acid
  VARIANT 71: note = Any amino acid
  VARIANT 72: note = Any amino acid
  VARIANT 73: note = Any amino acid
  VARIANT 74: note = Any amino acid
  VARIANT 75: note = Any amino acid
  VARIANT 76: note = Any amino acid
  VARIANT 77: note = Any amino acid
  VARIANT 78: note = Any amino acid
  VARIANT 79: note = Any amino acid
  VARIANT 80: note = Any amino acid
  VARIANT 81: note = Any amino acid
  VARIANT 82: note = Any amino acid
  VARIANT 83: note = Any amino acid
  VARIANT 84: note = Any amino acid
  VARIANT 85: note = Any amino acid
  VARIANT 86: note = Any amino acid
  VARIANT 87: note = Any amino acid
  VARIANT 88: note = Any amino acid
  VARIANT 89: note = Any amino acid
  VARIANT 90: note = Any amino acid
  VARIANT 91: note = Any amino acid
  VARIANT 92: note = Any amino acid
  VARIANT 93: note = Any amino acid
  VARIANT 95: note = Any amino acid
  VARIANT 97: note = Any amino acid
  VARIANT 98: note = Any amino acid
DXXXXXXXXXXXXXXXXXXXXXXXXXXXXXXXXXXXXXXXXXXXXXXXXXXXXXXXXXXXXXEXXXXXXXXXXXXXXXXXXXXXXXXXXXXXXKXDXXD

SEQ ID NO: 795755 - protein, 103 aa, unidentified
  VARIANT 2: note = Any amino acid
  VARIANT 3: note = Any amino acid
  VARIANT 4: note = Any amino acid
  VARIANT 5: note = Any amino acid
  VARIANT 6: note = Any amino acid
  VARIANT 7: note = Any amino acid
  VARIANT 8: note = Any amino acid
  VARIANT 9: note = Any amino acid
  VARIANT 10: note = Any amino acid
  VARIANT 11: note = Any amino acid
  VARIANT 12: note = Any amino acid
  VARIANT 13: note = Any amino acid
  VARIANT 14: note = Any amino acid
  VARIANT 15: note = Any amino acid
  VARIANT 16: note = Any amino acid
  VARIANT 17: note = Any amino acid
  VARIANT 18: note = Any amino acid
  VARIANT 19: note = Any amino acid
  VARIANT 20: note = Any amino acid
  VARIANT 21: note = Any amino acid
  VARIANT 22: note = Any amino acid
  VARIANT 23: note = Any amino acid
  VARIANT 24: note = Any amino acid
  VARIANT 25: note = Any amino acid
  VARIANT 26: note = Any amino acid
  VARIANT 27: note = Any amino acid
  VARIANT 28: note = Any amino acid
  VARIANT 29: note = Any amino acid
  VARIANT 30: note = Any amino acid
  VARIANT 31: note = Any amino acid
  VARIANT 32: note = Any amino acid
  VARIANT 33: note = Any amino acid
  VARIANT 34: note = Any amino acid
  VARIANT 35: note = Any amino acid
  VARIANT 36: note = Any amino acid
  VARIANT 37: note = Any amino acid
  VARIANT 38: note = Any amino acid
  VARIANT 39: note = Any amino acid
  VARIANT 40: note = Any amino acid
  VARIANT 41: note = Any amino acid
  VARIANT 42: note = Any amino acid
  VARIANT 43: note = Any amino acid
  VARIANT 44: note = Any amino acid
  VARIANT 45: note = Any amino acid
  VARIANT 46: note = Any amino acid
  VARIANT 47: note = Any amino acid
  VARIANT 48: note = Any amino acid
  VARIANT 49: note = Any amino acid
  VARIANT 50: note = Any amino acid
  VARIANT 51: note = Any amino acid
  VARIANT 52: note = Any amino acid
  VARIANT 53: note = Any amino acid
  VARIANT 54: note = Any amino acid
  VARIANT 56: note = Any amino acid
  VARIANT 57: note = Any amino acid
  VARIANT 58: note = Any amino acid
  VARIANT 59: note = Any amino acid
  VARIANT 60: note = Any amino acid
  VARIANT 61: note = Any amino acid
  VARIANT 62: note = Any amino acid
  VARIANT 63: note = Any amino acid
  VARIANT 64: note = Any amino acid
  VARIANT 65: note = Any amino acid
  VARIANT 66: note = Any amino acid
  VARIANT 67: note = Any amino acid
  VARIANT 68: note = Any amino acid
  VARIANT 69: note = Any amino acid
  VARIANT 70: note = Any amino acid
  VARIANT 71: note = Any amino acid
  VARIANT 72: note = Any amino acid
  VARIANT 73: note = Any amino acid
  VARIANT 74: note = Any amino acid
  VARIANT 75: note = Any amino acid
  VARIANT 76: note = Any amino acid
  VARIANT 77: note = Any amino acid
  VARIANT 78: note = Any amino acid
  VARIANT 79: note = Any amino acid
  VARIANT 80: note = Any amino acid
  VARIANT 81: note = Any amino acid
  VARIANT 82: note = Any amino acid
  VARIANT 83: note = Any amino acid
  VARIANT 84: note = Any amino acid
  VARIANT 85: note = Any amino acid
  VARIANT 86: note = Any amino acid
  VARIANT 87: note = Any amino acid
  VARIANT 88: note = Any amino acid
  VARIANT 89: note = Any amino acid
  VARIANT 90: note = Any amino acid
  VARIANT 91: note = Any amino acid
  VARIANT 92: note = Any amino acid
  VARIANT 93: note = Any amino acid
  VARIANT 94: note = Any amino acid
  VARIANT 95: note = Any amino acid
  VARIANT 96: note = Any amino acid
  VARIANT 97: note = Any amino acid
  VARIANT 99: note = Any amino acid
  VARIANT 101: note = Any amino acid
  VARIANT 102: note = Any amino acid
DXXXXXXXXXXXXXXXXXXXXXXXXXXXXXXXXXXXXXXXXXXXXXXXXXXXXXEXXXXXXXXXXXXXXXXXXXXXXXXXXXXXXXXXXXXXXXXXXKXDXXD

SEQ ID NO: 795756 - protein, 108 aa, unidentified
  VARIANT 2: note = Any amino acid
  VARIANT 3: note = Any amino acid
  VARIANT 4: note = Any amino acid
  VARIANT 5: note = Any amino acid
  VARIANT 6: note = Any amino acid
  VARIANT 7: note = Any amino acid
  VARIANT 8: note = Any amino acid
  VARIANT 9: note = Any amino acid
  VARIANT 10: note = Any amino acid
  VARIANT 11: note = Any amino acid
  VARIANT 12: note = Any amino acid
  VARIANT 13: note = Any amino acid
  VARIANT 14: note = Any amino acid
  VARIANT 15: note = Any amino acid
  VARIANT 16: note = Any amino acid
  VARIANT 17: note = Any amino acid
  VARIANT 18: note = Any amino acid
  VARIANT 19: note = Any amino acid
  VARIANT 20: note = Any amino acid
  VARIANT 21: note = Any amino acid
  VARIANT 22: note = Any amino acid
  VARIANT 23: note = Any amino acid
  VARIANT 24: note = Any amino acid
  VARIANT 25: note = Any amino acid
  VARIANT 26: note = Any amino acid
  VARIANT 27: note = Any amino acid
  VARIANT 28: note = Any amino acid
  VARIANT 29: note = Any amino acid
  VARIANT 30: note = Any amino acid
  VARIANT 31: note = Any amino acid
  VARIANT 32: note = Any amino acid
  VARIANT 33: note = Any amino acid
  VARIANT 34: note = Any amino acid
  VARIANT 35: note = Any amino acid
  VARIANT 36: note = Any amino acid
  VARIANT 37: note = Any amino acid
  VARIANT 38: note = Any amino acid
  VARIANT 39: note = Any amino acid
  VARIANT 40: note = Any amino acid
  VARIANT 41: note = Any amino acid
  VARIANT 42: note = Any amino acid
  VARIANT 43: note = Any amino acid
  VARIANT 44: note = Any amino acid
  VARIANT 45: note = Any amino acid
  VARIANT 46: note = Any amino acid
  VARIANT 47: note = Any amino acid
  VARIANT 48: note = Any amino acid
  VARIANT 49: note = Any amino acid
  VARIANT 50: note = Any amino acid
  VARIANT 51: note = Any amino acid
  VARIANT 52: note = Any amino acid
  VARIANT 53: note = Any amino acid
  VARIANT 54: note = Any amino acid
  VARIANT 55: note = Any amino acid
  VARIANT 57: note = Any amino acid
  VARIANT 58: note = Any amino acid
  VARIANT 59: note = Any amino acid
  VARIANT 60: note = Any amino acid
  VARIANT 61: note = Any amino acid
  VARIANT 62: note = Any amino acid
  VARIANT 63: note = Any amino acid
  VARIANT 64: note = Any amino acid
  VARIANT 65: note = Any amino acid
  VARIANT 66: note = Any amino acid
  VARIANT 67: note = Any amino acid
  VARIANT 68: note = Any amino acid
  VARIANT 69: note = Any amino acid
  VARIANT 70: note = Any amino acid
  VARIANT 71: note = Any amino acid
  VARIANT 72: note = Any amino acid
  VARIANT 73: note = Any amino acid
  VARIANT 74: note = Any amino acid
  VARIANT 75: note = Any amino acid
  VARIANT 76: note = Any amino acid
  VARIANT 77: note = Any amino acid
  VARIANT 78: note = Any amino acid
  VARIANT 79: note = Any amino acid
  VARIANT 80: note = Any amino acid
  VARIANT 81: note = Any amino acid
  VARIANT 82: note = Any amino acid
  VARIANT 83: note = Any amino acid
  VARIANT 84: note = Any amino acid
  VARIANT 85: note = Any amino acid
  VARIANT 86: note = Any amino acid
  VARIANT 87: note = Any amino acid
  VARIANT 88: note = Any amino acid
  VARIANT 89: note = Any amino acid
  VARIANT 90: note = Any amino acid
  VARIANT 91: note = Any amino acid
  VARIANT 92: note = Any amino acid
  VARIANT 93: note = Any amino acid
  VARIANT 94: note = Any amino acid
  VARIANT 95: note = Any amino acid
  VARIANT 96: note = Any amino acid
  VARIANT 97: note = Any amino acid
  VARIANT 98: note = Any amino acid
  VARIANT 99: note = Any amino acid
  VARIANT 100: note = Any amino acid
  VARIANT 101: note = Any amino acid
  VARIANT 102: note = Any amino acid
  VARIANT 104: note = Any amino acid
  VARIANT 106: note = Any amino acid
  VARIANT 107: note = Any amino acid
DXXXXXXXXXXXXXXXXXXXXXXXXXXXXXXXXXXXXXXXXXXXXXXXXXXXXXXEXXXXXXXXXXXXXXXXXXXXXXXXXXXXXXXXXXXXXXXXXXXXXXKXDXXD

SEQ ID NO: 795757 - protein, 85 aa, unidentified
  VARIANT 2: note = Any amino acid
  VARIANT 3: note = Any amino acid
  VARIANT 4: note = Any amino acid
  VARIANT 5: note = Any amino acid
  VARIANT 6: note = Any amino acid
  VARIANT 7: note = Any amino acid
  VARIANT 8: note = Any amino acid
  VARIANT 9: note = Any amino acid
  VARIANT 10: note = Any amino acid
  VARIANT 11: note = Any amino acid
  VARIANT 12: note = Any amino acid
  VARIANT 13: note = Any amino acid
  VARIANT 14: note = Any amino acid
  VARIANT 15: note = Any amino acid
  VARIANT 16: note = Any amino acid
  VARIANT 17: note = Any amino acid
  VARIANT 18: note = Any amino acid
  VARIANT 19: note = Any amino acid
  VARIANT 20: note = Any amino acid
  VARIANT 21: note = Any amino acid
  VARIANT 22: note = Any amino acid
  VARIANT 23: note = Any amino acid
  VARIANT 24: note = Any amino acid
  VARIANT 25: note = Any amino acid
  VARIANT 26: note = Any amino acid
  VARIANT 27: note = Any amino acid
  VARIANT 28: note = Any amino acid
  VARIANT 29: note = Any amino acid
  VARIANT 30: note = Any amino acid
  VARIANT 31: note = Any amino acid
  VARIANT 32: note = Any amino acid
  VARIANT 33: note = Any amino acid
  VARIANT 34: note = Any amino acid
  VARIANT 35: note = Any amino acid
  VARIANT 36: note = Any amino acid
  VARIANT 37: note = Any amino acid
  VARIANT 38: note = Any amino acid
  VARIANT 39: note = Any amino acid
  VARIANT 40: note = Any amino acid
  VARIANT 41: note = Any amino acid
  VARIANT 42: note = Any amino acid
  VARIANT 43: note = Any amino acid
  VARIANT 45: note = Any amino acid
  VARIANT 46: note = Any amino acid
  VARIANT 47: note = Any amino acid
  VARIANT 48: note = Any amino acid
  VARIANT 49: note = Any amino acid
  VARIANT 50: note = Any amino acid
  VARIANT 51: note = Any amino acid
  VARIANT 52: note = Any amino acid
  VARIANT 53: note = Any amino acid
  VARIANT 54: note = Any amino acid
  VARIANT 55: note = Any amino acid
  VARIANT 56: note = Any amino acid
  VARIANT 57: note = Any amino acid
  VARIANT 58: note = Any amino acid
  VARIANT 59: note = Any amino acid
  VARIANT 60: note = Any amino acid
  VARIANT 61: note = Any amino acid
  VARIANT 62: note = Any amino acid
  VARIANT 63: note = Any amino acid
  VARIANT 64: note = Any amino acid
  VARIANT 65: note = Any amino acid
  VARIANT 66: note = Any amino acid
  VARIANT 67: note = Any amino acid
  VARIANT 68: note = Any amino acid
  VARIANT 69: note = Any amino acid
  VARIANT 70: note = Any amino acid
  VARIANT 71: note = Any amino acid
  VARIANT 72: note = Any amino acid
  VARIANT 73: note = Any amino acid
  VARIANT 74: note = Any amino acid
  VARIANT 75: note = Any amino acid
  VARIANT 76: note = Any amino acid
  VARIANT 77: note = Any amino acid
  VARIANT 78: note = Any amino acid
  VARIANT 79: note = Any amino acid
  VARIANT 81: note = Any amino acid
  VARIANT 83: note = Any amino acid
  VARIANT 84: note = Any amino acid
DXXXXXXXXXXXXXXXXXXXXXXXXXXXXXXXXXXXXXXXXXXEXXXXXXXXXXXXXXXXXXXXXXXXXXXXXXXXXXXKXDXXD

SEQ ID NO: 795758 - protein, 90 aa, unidentified
  VARIANT 2: note = Any amino acid
  VARIANT 3: note = Any amino acid
  VARIANT 4: note = Any amino acid
  VARIANT 5: note = Any amino acid
  VARIANT 6: note = Any amino acid
  VARIANT 7: note = Any amino acid
  VARIANT 8: note = Any amino acid
  VARIANT 9: note = Any amino acid
  VARIANT 10: note = Any amino acid
  VARIANT 11: note = Any amino acid
  VARIANT 12: note = Any amino acid
  VARIANT 13: note = Any amino acid
  VARIANT 14: note = Any amino acid
  VARIANT 15: note = Any amino acid
  VARIANT 16: note = Any amino acid
  VARIANT 17: note = Any amino acid
  VARIANT 18: note = Any amino acid
  VARIANT 19: note = Any amino acid
  VARIANT 20: note = Any amino acid
  VARIANT 21: note = Any amino acid
  VARIANT 22: note = Any amino acid
  VARIANT 23: note = Any amino acid
  VARIANT 24: note = Any amino acid
  VARIANT 25: note = Any amino acid
  VARIANT 26: note = Any amino acid
  VARIANT 27: note = Any amino acid
  VARIANT 28: note = Any amino acid
  VARIANT 29: note = Any amino acid
  VARIANT 30: note = Any amino acid
  VARIANT 31: note = Any amino acid
  VARIANT 32: note = Any amino acid
  VARIANT 33: note = Any amino acid
  VARIANT 34: note = Any amino acid
  VARIANT 35: note = Any amino acid
  VARIANT 36: note = Any amino acid
  VARIANT 37: note = Any amino acid
  VARIANT 38: note = Any amino acid
  VARIANT 39: note = Any amino acid
  VARIANT 40: note = Any amino acid
  VARIANT 41: note = Any amino acid
  VARIANT 42: note = Any amino acid
  VARIANT 43: note = Any amino acid
  VARIANT 44: note = Any amino acid
  VARIANT 46: note = Any amino acid
  VARIANT 47: note = Any amino acid
  VARIANT 48: note = Any amino acid
  VARIANT 49: note = Any amino acid
  VARIANT 50: note = Any amino acid
  VARIANT 51: note = Any amino acid
  VARIANT 52: note = Any amino acid
  VARIANT 53: note = Any amino acid
  VARIANT 54: note = Any amino acid
  VARIANT 55: note = Any amino acid
  VARIANT 56: note = Any amino acid
  VARIANT 57: note = Any amino acid
  VARIANT 58: note = Any amino acid
  VARIANT 59: note = Any amino acid
  VARIANT 60: note = Any amino acid
  VARIANT 61: note = Any amino acid
  VARIANT 62: note = Any amino acid
  VARIANT 63: note = Any amino acid
  VARIANT 64: note = Any amino acid
  VARIANT 65: note = Any amino acid
  VARIANT 66: note = Any amino acid
  VARIANT 67: note = Any amino acid
  VARIANT 68: note = Any amino acid
  VARIANT 69: note = Any amino acid
  VARIANT 70: note = Any amino acid
  VARIANT 71: note = Any amino acid
  VARIANT 72: note = Any amino acid
  VARIANT 73: note = Any amino acid
  VARIANT 74: note = Any amino acid
  VARIANT 75: note = Any amino acid
  VARIANT 76: note = Any amino acid
  VARIANT 77: note = Any amino acid
  VARIANT 78: note = Any amino acid
  VARIANT 79: note = Any amino acid
  VARIANT 80: note = Any amino acid
  VARIANT 81: note = Any amino acid
  VARIANT 82: note = Any amino acid
  VARIANT 83: note = Any amino acid
  VARIANT 84: note = Any amino acid
  VARIANT 86: note = Any amino acid
  VARIANT 88: note = Any amino acid
  VARIANT 89: note = Any amino acid
DXXXXXXXXXXXXXXXXXXXXXXXXXXXXXXXXXXXXXXXXXXXDXXXXXXXXXXXXXXXXXXXXXXXXXXXXXXXXXXXXXXXKXDXXD

SEQ ID NO: 795759 - protein, 88 aa, unidentified
  VARIANT 2: note = Any amino acid
  VARIANT 3: note = Any amino acid
  VARIANT 4: note = Any amino acid
  VARIANT 5: note = Any amino acid
  VARIANT 6: note = Any amino acid
  VARIANT 7: note = Any amino acid
  VARIANT 8: note = Any amino acid
  VARIANT 9: note = Any amino acid
  VARIANT 10: note = Any amino acid
  VARIANT 11: note = Any amino acid
  VARIANT 12: note = Any amino acid
  VARIANT 13: note = Any amino acid
  VARIANT 14: note = Any amino acid
  VARIANT 15: note = Any amino acid
  VARIANT 16: note = Any amino acid
  VARIANT 17: note = Any amino acid
  VARIANT 18: note = Any amino acid
  VARIANT 19: note = Any amino acid
  VARIANT 20: note = Any amino acid
  VARIANT 21: note = Any amino acid
  VARIANT 22: note = Any amino acid
  VARIANT 23: note = Any amino acid
  VARIANT 24: note = Any amino acid
  VARIANT 25: note = Any amino acid
  VARIANT 26: note = Any amino acid
  VARIANT 27: note = Any amino acid
  VARIANT 28: note = Any amino acid
  VARIANT 29: note = Any amino acid
  VARIANT 30: note = Any amino acid
  VARIANT 31: note = Any amino acid
  VARIANT 32: note = Any amino acid
  VARIANT 33: note = Any amino acid
  VARIANT 34: note = Any amino acid
  VARIANT 35: note = Any amino acid
  VARIANT 36: note = Any amino acid
  VARIANT 37: note = Any amino acid
  VARIANT 38: note = Any amino acid
  VARIANT 39: note = Any amino acid
  VARIANT 40: note = Any amino acid
  VARIANT 41: note = Any amino acid
  VARIANT 42: note = Any amino acid
  VARIANT 43: note = Any amino acid
  VARIANT 44: note = Any amino acid
  VARIANT 45: note = Any amino acid
  VARIANT 46: note = Any amino acid
  VARIANT 48: note = Any amino acid
  VARIANT 49: note = Any amino acid
  VARIANT 50: note = Any amino acid
  VARIANT 51: note = Any amino acid
  VARIANT 52: note = Any amino acid
  VARIANT 53: note = Any amino acid
  VARIANT 54: note = Any amino acid
  VARIANT 55: note = Any amino acid
  VARIANT 56: note = Any amino acid
  VARIANT 57: note = Any amino acid
  VARIANT 58: note = Any amino acid
  VARIANT 59: note = Any amino acid
  VARIANT 60: note = Any amino acid
  VARIANT 61: note = Any amino acid
  VARIANT 62: note = Any amino acid
  VARIANT 63: note = Any amino acid
  VARIANT 64: note = Any amino acid
  VARIANT 65: note = Any amino acid
  VARIANT 66: note = Any amino acid
  VARIANT 67: note = Any amino acid
  VARIANT 68: note = Any amino acid
  VARIANT 69: note = Any amino acid
  VARIANT 70: note = Any amino acid
  VARIANT 71: note = Any amino acid
  VARIANT 72: note = Any amino acid
  VARIANT 73: note = Any amino acid
  VARIANT 74: note = Any amino acid
  VARIANT 75: note = Any amino acid
  VARIANT 76: note = Any amino acid
  VARIANT 77: note = Any amino acid
  VARIANT 78: note = Any amino acid
  VARIANT 79: note = Any amino acid
  VARIANT 80: note = Any amino acid
  VARIANT 81: note = Any amino acid
  VARIANT 82: note = Any amino acid
  VARIANT 84: note = Any amino acid
  VARIANT 86: note = Any amino acid
  VARIANT 87: note = Any amino acid
DXXXXXXXXXXXXXXXXXXXXXXXXXXXXXXXXXXXXXXXXXXXXXEXXXXXXXXXXXXXXXXXXXXXXXXXXXXXXXXXXXKXDXXD

SEQ ID NO: 795760 - protein, 115 aa, unidentified
  VARIANT 2: note = Any amino acid
  VARIANT 3: note = Any amino acid
  VARIANT 4: note = Any amino acid
  VARIANT 5: note = Any amino acid
  VARIANT 6: note = Any amino acid
  VARIANT 7: note = Any amino acid
  VARIANT 8: note = Any amino acid
  VARIANT 9: note = Any amino acid
  VARIANT 10: note = Any amino acid
  VARIANT 11: note = Any amino acid
  VARIANT 12: note = Any amino acid
  VARIANT 13: note = Any amino acid
  VARIANT 14: note = Any amino acid
  VARIANT 15: note = Any amino acid
  VARIANT 16: note = Any amino acid
  VARIANT 17: note = Any amino acid
  VARIANT 18: note = Any amino acid
  VARIANT 19: note = Any amino acid
  VARIANT 20: note = Any amino acid
  VARIANT 21: note = Any amino acid
  VARIANT 22: note = Any amino acid
  VARIANT 23: note = Any amino acid
  VARIANT 24: note = Any amino acid
  VARIANT 25: note = Any amino acid
  VARIANT 26: note = Any amino acid
  VARIANT 27: note = Any amino acid
  VARIANT 28: note = Any amino acid
  VARIANT 29: note = Any amino acid
  VARIANT 30: note = Any amino acid
  VARIANT 31: note = Any amino acid
  VARIANT 32: note = Any amino acid
  VARIANT 33: note = Any amino acid
  VARIANT 34: note = Any amino acid
  VARIANT 35: note = Any amino acid
  VARIANT 36: note = Any amino acid
  VARIANT 37: note = Any amino acid
  VARIANT 38: note = Any amino acid
  VARIANT 39: note = Any amino acid
  VARIANT 40: note = Any amino acid
  VARIANT 41: note = Any amino acid
  VARIANT 42: note = Any amino acid
  VARIANT 43: note = Any amino acid
  VARIANT 44: note = Any amino acid
  VARIANT 45: note = Any amino acid
  VARIANT 46: note = Any amino acid
  VARIANT 47: note = Any amino acid
  VARIANT 48: note = Any amino acid
  VARIANT 49: note = Any amino acid
  VARIANT 50: note = Any amino acid
  VARIANT 51: note = Any amino acid
  VARIANT 52: note = Any amino acid
  VARIANT 53: note = Any amino acid
  VARIANT 54: note = Any amino acid
  VARIANT 55: note = Any amino acid
  VARIANT 57: note = Any amino acid
  VARIANT 58: note = Any amino acid
  VARIANT 59: note = Any amino acid
  VARIANT 60: note = Any amino acid
  VARIANT 61: note = Any amino acid
  VARIANT 62: note = Any amino acid
  VARIANT 63: note = Any amino acid
  VARIANT 64: note = Any amino acid
  VARIANT 65: note = Any amino acid
  VARIANT 66: note = Any amino acid
  VARIANT 67: note = Any amino acid
  VARIANT 68: note = Any amino acid
  VARIANT 69: note = Any amino acid
  VARIANT 70: note = Any amino acid
  VARIANT 71: note = Any amino acid
  VARIANT 72: note = Any amino acid
  VARIANT 73: note = Any amino acid
  VARIANT 74: note = Any amino acid
  VARIANT 75: note = Any amino acid
  VARIANT 76: note = Any amino acid
  VARIANT 77: note = Any amino acid
  VARIANT 78: note = Any amino acid
  VARIANT 79: note = Any amino acid
  VARIANT 80: note = Any amino acid
  VARIANT 81: note = Any amino acid
  VARIANT 82: note = Any amino acid
  VARIANT 83: note = Any amino acid
  VARIANT 84: note = Any amino acid
  VARIANT 85: note = Any amino acid
  VARIANT 86: note = Any amino acid
  VARIANT 87: note = Any amino acid
  VARIANT 88: note = Any amino acid
  VARIANT 89: note = Any amino acid
  VARIANT 90: note = Any amino acid
  VARIANT 91: note = Any amino acid
  VARIANT 92: note = Any amino acid
  VARIANT 93: note = Any amino acid
  VARIANT 94: note = Any amino acid
  VARIANT 95: note = Any amino acid
  VARIANT 96: note = Any amino acid
  VARIANT 97: note = Any amino acid
  VARIANT 98: note = Any amino acid
  VARIANT 99: note = Any amino acid
  VARIANT 100: note = Any amino acid
  VARIANT 101: note = Any amino acid
  VARIANT 102: note = Any amino acid
  VARIANT 103: note = Any amino acid
  VARIANT 104: note = Any amino acid
  VARIANT 105: note = Any amino acid
  VARIANT 106: note = Any amino acid
  VARIANT 107: note = Any amino acid
  VARIANT 108: note = Any amino acid
  VARIANT 109: note = Any amino acid
  VARIANT 111: note = Any amino acid
  VARIANT 113: note = Any amino acid
  VARIANT 114: note = Any amino acid
DXXXXXXXXXXXXXXXXXXXXXXXXXXXXXXXXXXXXXXXXXXXXXXXXXXXXXXDXXXXXXXXXXXXXXXXXXXXXXXXXXXXXXXXXXXXXXXXXXXXXXXXXXXXXKXDXXE

SEQ ID NO: 795761 - protein, 102 aa, unidentified
  VARIANT 2: note = Any amino acid
  VARIANT 3: note = Any amino acid
  VARIANT 4: note = Any amino acid
  VARIANT 5: note = Any amino acid
  VARIANT 6: note = Any amino acid
  VARIANT 7: note = Any amino acid
  VARIANT 8: note = Any amino acid
  VARIANT 9: note = Any amino acid
  VARIANT 10: note = Any amino acid
  VARIANT 11: note = Any amino acid
  VARIANT 12: note = Any amino acid
  VARIANT 13: note = Any amino acid
  VARIANT 14: note = Any amino acid
  VARIANT 15: note = Any amino acid
  VARIANT 16: note = Any amino acid
  VARIANT 17: note = Any amino acid
  VARIANT 18: note = Any amino acid
  VARIANT 19: note = Any amino acid
  VARIANT 20: note = Any amino acid
  VARIANT 21: note = Any amino acid
  VARIANT 22: note = Any amino acid
  VARIANT 23: note = Any amino acid
  VARIANT 24: note = Any amino acid
  VARIANT 25: note = Any amino acid
  VARIANT 26: note = Any amino acid
  VARIANT 27: note = Any amino acid
  VARIANT 28: note = Any amino acid
  VARIANT 29: note = Any amino acid
  VARIANT 30: note = Any amino acid
  VARIANT 31: note = Any amino acid
  VARIANT 32: note = Any amino acid
  VARIANT 33: note = Any amino acid
  VARIANT 34: note = Any amino acid
  VARIANT 35: note = Any amino acid
  VARIANT 36: note = Any amino acid
  VARIANT 37: note = Any amino acid
  VARIANT 38: note = Any amino acid
  VARIANT 39: note = Any amino acid
  VARIANT 40: note = Any amino acid
  VARIANT 41: note = Any amino acid
  VARIANT 42: note = Any amino acid
  VARIANT 43: note = Any amino acid
  VARIANT 44: note = Any amino acid
  VARIANT 45: note = Any amino acid
  VARIANT 46: note = Any amino acid
  VARIANT 47: note = Any amino acid
  VARIANT 48: note = Any amino acid
  VARIANT 49: note = Any amino acid
  VARIANT 50: note = Any amino acid
  VARIANT 51: note = Any amino acid
  VARIANT 52: note = Any amino acid
  VARIANT 53: note = Any amino acid
  VARIANT 54: note = Any amino acid
  VARIANT 55: note = Any amino acid
  VARIANT 57: note = Any amino acid
  VARIANT 58: note = Any amino acid
  VARIANT 59: note = Any amino acid
  VARIANT 60: note = Any amino acid
  VARIANT 61: note = Any amino acid
  VARIANT 62: note = Any amino acid
  VARIANT 63: note = Any amino acid
  VARIANT 64: note = Any amino acid
  VARIANT 65: note = Any amino acid
  VARIANT 66: note = Any amino acid
  VARIANT 67: note = Any amino acid
  VARIANT 68: note = Any amino acid
  VARIANT 69: note = Any amino acid
  VARIANT 70: note = Any amino acid
  VARIANT 71: note = Any amino acid
  VARIANT 72: note = Any amino acid
  VARIANT 73: note = Any amino acid
  VARIANT 74: note = Any amino acid
  VARIANT 75: note = Any amino acid
  VARIANT 76: note = Any amino acid
  VARIANT 77: note = Any amino acid
  VARIANT 78: note = Any amino acid
  VARIANT 79: note = Any amino acid
  VARIANT 80: note = Any amino acid
  VARIANT 81: note = Any amino acid
  VARIANT 82: note = Any amino acid
  VARIANT 83: note = Any amino acid
  VARIANT 84: note = Any amino acid
  VARIANT 85: note = Any amino acid
  VARIANT 86: note = Any amino acid
  VARIANT 87: note = Any amino acid
  VARIANT 88: note = Any amino acid
  VARIANT 89: note = Any amino acid
  VARIANT 90: note = Any amino acid
  VARIANT 91: note = Any amino acid
  VARIANT 92: note = Any amino acid
  VARIANT 93: note = Any amino acid
  VARIANT 94: note = Any amino acid
  VARIANT 95: note = Any amino acid
  VARIANT 96: note = Any amino acid
  VARIANT 98: note = Any amino acid
  VARIANT 100: note = Any amino acid
  VARIANT 101: note = Any amino acid
DXXXXXXXXXXXXXXXXXXXXXXXXXXXXXXXXXXXXXXXXXXXXXXXXXXXXXXEXXXXXXXXXXXXXXXXXXXXXXXXXXXXXXXXXXXXXXXXKXDXXC

SEQ ID NO: 795762 - protein, 102 aa, unidentified
  VARIANT 2: note = Any amino acid
  VARIANT 3: note = Any amino acid
  VARIANT 4: note = Any amino acid
  VARIANT 5: note = Any amino acid
  VARIANT 6: note = Any amino acid
  VARIANT 7: note = Any amino acid
  VARIANT 8: note = Any amino acid
  VARIANT 9: note = Any amino acid
  VARIANT 10: note = Any amino acid
  VARIANT 11: note = Any amino acid
  VARIANT 12: note = Any amino acid
  VARIANT 13: note = Any amino acid
  VARIANT 14: note = Any amino acid
  VARIANT 15: note = Any amino acid
  VARIANT 16: note = Any amino acid
  VARIANT 17: note = Any amino acid
  VARIANT 18: note = Any amino acid
  VARIANT 19: note = Any amino acid
  VARIANT 20: note = Any amino acid
  VARIANT 21: note = Any amino acid
  VARIANT 22: note = Any amino acid
  VARIANT 23: note = Any amino acid
  VARIANT 24: note = Any amino acid
  VARIANT 25: note = Any amino acid
  VARIANT 26: note = Any amino acid
  VARIANT 27: note = Any amino acid
  VARIANT 28: note = Any amino acid
  VARIANT 29: note = Any amino acid
  VARIANT 30: note = Any amino acid
  VARIANT 31: note = Any amino acid
  VARIANT 32: note = Any amino acid
  VARIANT 33: note = Any amino acid
  VARIANT 34: note = Any amino acid
  VARIANT 35: note = Any amino acid
  VARIANT 36: note = Any amino acid
  VARIANT 37: note = Any amino acid
  VARIANT 38: note = Any amino acid
  VARIANT 39: note = Any amino acid
  VARIANT 40: note = Any amino acid
  VARIANT 41: note = Any amino acid
  VARIANT 42: note = Any amino acid
  VARIANT 43: note = Any amino acid
  VARIANT 44: note = Any amino acid
  VARIANT 45: note = Any amino acid
  VARIANT 46: note = Any amino acid
  VARIANT 47: note = Any amino acid
  VARIANT 48: note = Any amino acid
  VARIANT 49: note = Any amino acid
  VARIANT 50: note = Any amino acid
  VARIANT 51: note = Any amino acid
  VARIANT 52: note = Any amino acid
  VARIANT 53: note = Any amino acid
  VARIANT 54: note = Any amino acid
  VARIANT 55: note = Any amino acid
  VARIANT 56: note = Any amino acid
  VARIANT 58: note = Any amino acid
  VARIANT 59: note = Any amino acid
  VARIANT 60: note = Any amino acid
  VARIANT 61: note = Any amino acid
  VARIANT 62: note = Any amino acid
  VARIANT 63: note = Any amino acid
  VARIANT 64: note = Any amino acid
  VARIANT 65: note = Any amino acid
  VARIANT 66: note = Any amino acid
  VARIANT 67: note = Any amino acid
  VARIANT 68: note = Any amino acid
  VARIANT 69: note = Any amino acid
  VARIANT 70: note = Any amino acid
  VARIANT 71: note = Any amino acid
  VARIANT 72: note = Any amino acid
  VARIANT 73: note = Any amino acid
  VARIANT 74: note = Any amino acid
  VARIANT 75: note = Any amino acid
  VARIANT 76: note = Any amino acid
  VARIANT 77: note = Any amino acid
  VARIANT 78: note = Any amino acid
  VARIANT 79: note = Any amino acid
  VARIANT 80: note = Any amino acid
  VARIANT 81: note = Any amino acid
  VARIANT 82: note = Any amino acid
  VARIANT 83: note = Any amino acid
  VARIANT 84: note = Any amino acid
  VARIANT 85: note = Any amino acid
  VARIANT 86: note = Any amino acid
  VARIANT 87: note = Any amino acid
  VARIANT 88: note = Any amino acid
  VARIANT 89: note = Any amino acid
  VARIANT 90: note = Any amino acid
  VARIANT 91: note = Any amino acid
  VARIANT 92: note = Any amino acid
  VARIANT 93: note = Any amino acid
  VARIANT 94: note = Any amino acid
  VARIANT 95: note = Any amino acid
  VARIANT 96: note = Any amino acid
  VARIANT 98: note = Any amino acid
  VARIANT 100: note = Any amino acid
  VARIANT 101: note = Any amino acid
DXXXXXXXXXXXXXXXXXXXXXXXXXXXXXXXXXXXXXXXXXXXXXXXXXXXXXXXEXXXXXXXXXXXXXXXXXXXXXXXXXXXXXXXXXXXXXXXVXDXXC

SEQ ID NO: 795763 - protein, 91 aa, unidentified
  VARIANT 2: note = Any amino acid
  VARIANT 3: note = Any amino acid
  VARIANT 4: note = Any amino acid
  VARIANT 5: note = Any amino acid
  VARIANT 6: note = Any amino acid
  VARIANT 7: note = Any amino acid
  VARIANT 8: note = Any amino acid
  VARIANT 9: note = Any amino acid
  VARIANT 10: note = Any amino acid
  VARIANT 11: note = Any amino acid
  VARIANT 12: note = Any amino acid
  VARIANT 13: note = Any amino acid
  VARIANT 14: note = Any amino acid
  VARIANT 15: note = Any amino acid
  VARIANT 16: note = Any amino acid
  VARIANT 17: note = Any amino acid
  VARIANT 18: note = Any amino acid
  VARIANT 19: note = Any amino acid
  VARIANT 20: note = Any amino acid
  VARIANT 21: note = Any amino acid
  VARIANT 22: note = Any amino acid
  VARIANT 23: note = Any amino acid
  VARIANT 24: note = Any amino acid
  VARIANT 25: note = Any amino acid
  VARIANT 26: note = Any amino acid
  VARIANT 27: note = Any amino acid
  VARIANT 28: note = Any amino acid
  VARIANT 29: note = Any amino acid
  VARIANT 30: note = Any amino acid
  VARIANT 31: note = Any amino acid
  VARIANT 32: note = Any amino acid
  VARIANT 33: note = Any amino acid
  VARIANT 34: note = Any amino acid
  VARIANT 35: note = Any amino acid
  VARIANT 36: note = Any amino acid
  VARIANT 37: note = Any amino acid
  VARIANT 38: note = Any amino acid
  VARIANT 39: note = Any amino acid
  VARIANT 40: note = Any amino acid
  VARIANT 41: note = Any amino acid
  VARIANT 42: note = Any amino acid
  VARIANT 43: note = Any amino acid
  VARIANT 44: note = Any amino acid
  VARIANT 46: note = Any amino acid
  VARIANT 47: note = Any amino acid
  VARIANT 48: note = Any amino acid
  VARIANT 49: note = Any amino acid
  VARIANT 50: note = Any amino acid
  VARIANT 51: note = Any amino acid
  VARIANT 52: note = Any amino acid
  VARIANT 53: note = Any amino acid
  VARIANT 54: note = Any amino acid
  VARIANT 55: note = Any amino acid
  VARIANT 56: note = Any amino acid
  VARIANT 57: note = Any amino acid
  VARIANT 58: note = Any amino acid
  VARIANT 59: note = Any amino acid
  VARIANT 60: note = Any amino acid
  VARIANT 61: note = Any amino acid
  VARIANT 62: note = Any amino acid
  VARIANT 63: note = Any amino acid
  VARIANT 64: note = Any amino acid
  VARIANT 65: note = Any amino acid
  VARIANT 66: note = Any amino acid
  VARIANT 67: note = Any amino acid
  VARIANT 68: note = Any amino acid
  VARIANT 69: note = Any amino acid
  VARIANT 70: note = Any amino acid
  VARIANT 71: note = Any amino acid
  VARIANT 72: note = Any amino acid
  VARIANT 73: note = Any amino acid
  VARIANT 74: note = Any amino acid
  VARIANT 75: note = Any amino acid
  VARIANT 76: note = Any amino acid
  VARIANT 77: note = Any amino acid
  VARIANT 78: note = Any amino acid
  VARIANT 79: note = Any amino acid
  VARIANT 80: note = Any amino acid
  VARIANT 81: note = Any amino acid
  VARIANT 82: note = Any amino acid
  VARIANT 83: note = Any amino acid
  VARIANT 84: note = Any amino acid
  VARIANT 85: note = Any amino acid
  VARIANT 87: note = Any amino acid
  VARIANT 89: note = Any amino acid
  VARIANT 90: note = Any amino acid
DXXXXXXXXXXXXXXXXXXXXXXXXXXXXXXXXXXXXXXXXXXXEXXXXXXXXXXXXXXXXXXXXXXXXXXXXXXXXXXXXXXXXKXDXXD

SEQ ID NO: 795764 - protein, 106 aa, unidentified
  VARIANT 2: note = Any amino acid
  VARIANT 3: note = Any amino acid
  VARIANT 4: note = Any amino acid
  VARIANT 5: note = Any amino acid
  VARIANT 6: note = Any amino acid
  VARIANT 7: note = Any amino acid
  VARIANT 8: note = Any amino acid
  VARIANT 9: note = Any amino acid
  VARIANT 10: note = Any amino acid
  VARIANT 11: note = Any amino acid
  VARIANT 12: note = Any amino acid
  VARIANT 13: note = Any amino acid
  VARIANT 14: note = Any amino acid
  VARIANT 15: note = Any amino acid
  VARIANT 16: note = Any amino acid
  VARIANT 17: note = Any amino acid
  VARIANT 18: note = Any amino acid
  VARIANT 19: note = Any amino acid
  VARIANT 20: note = Any amino acid
  VARIANT 21: note = Any amino acid
  VARIANT 22: note = Any amino acid
  VARIANT 23: note = Any amino acid
  VARIANT 24: note = Any amino acid
  VARIANT 25: note = Any amino acid
  VARIANT 26: note = Any amino acid
  VARIANT 27: note = Any amino acid
  VARIANT 28: note = Any amino acid
  VARIANT 29: note = Any amino acid
  VARIANT 30: note = Any amino acid
  VARIANT 31: note = Any amino acid
  VARIANT 32: note = Any amino acid
  VARIANT 33: note = Any amino acid
  VARIANT 34: note = Any amino acid
  VARIANT 35: note = Any amino acid
  VARIANT 36: note = Any amino acid
  VARIANT 37: note = Any amino acid
  VARIANT 38: note = Any amino acid
  VARIANT 39: note = Any amino acid
  VARIANT 40: note = Any amino acid
  VARIANT 41: note = Any amino acid
  VARIANT 42: note = Any amino acid
  VARIANT 43: note = Any amino acid
  VARIANT 44: note = Any amino acid
  VARIANT 45: note = Any amino acid
  VARIANT 46: note = Any amino acid
  VARIANT 47: note = Any amino acid
  VARIANT 48: note = Any amino acid
  VARIANT 49: note = Any amino acid
  VARIANT 50: note = Any amino acid
  VARIANT 51: note = Any amino acid
  VARIANT 52: note = Any amino acid
  VARIANT 53: note = Any amino acid
  VARIANT 54: note = Any amino acid
  VARIANT 55: note = Any amino acid
  VARIANT 57: note = Any amino acid
  VARIANT 58: note = Any amino acid
  VARIANT 59: note = Any amino acid
  VARIANT 60: note = Any amino acid
  VARIANT 61: note = Any amino acid
  VARIANT 62: note = Any amino acid
  VARIANT 63: note = Any amino acid
  VARIANT 64: note = Any amino acid
  VARIANT 65: note = Any amino acid
  VARIANT 66: note = Any amino acid
  VARIANT 67: note = Any amino acid
  VARIANT 68: note = Any amino acid
  VARIANT 69: note = Any amino acid
  VARIANT 70: note = Any amino acid
  VARIANT 71: note = Any amino acid
  VARIANT 72: note = Any amino acid
  VARIANT 73: note = Any amino acid
  VARIANT 74: note = Any amino acid
  VARIANT 75: note = Any amino acid
  VARIANT 76: note = Any amino acid
  VARIANT 77: note = Any amino acid
  VARIANT 78: note = Any amino acid
  VARIANT 79: note = Any amino acid
  VARIANT 80: note = Any amino acid
  VARIANT 81: note = Any amino acid
  VARIANT 82: note = Any amino acid
  VARIANT 83: note = Any amino acid
  VARIANT 84: note = Any amino acid
  VARIANT 85: note = Any amino acid
  VARIANT 86: note = Any amino acid
  VARIANT 87: note = Any amino acid
  VARIANT 88: note = Any amino acid
  VARIANT 89: note = Any amino acid
  VARIANT 90: note = Any amino acid
  VARIANT 91: note = Any amino acid
  VARIANT 92: note = Any amino acid
  VARIANT 93: note = Any amino acid
  VARIANT 94: note = Any amino acid
  VARIANT 95: note = Any amino acid
  VARIANT 96: note = Any amino acid
  VARIANT 97: note = Any amino acid
  VARIANT 98: note = Any amino acid
  VARIANT 99: note = Any amino acid
  VARIANT 100: note = Any amino acid
  VARIANT 102: note = Any amino acid
  VARIANT 104: note = Any amino acid
  VARIANT 105: note = Any amino acid
DXXXXXXXXXXXXXXXXXXXXXXXXXXXXXXXXXXXXXXXXXXXXXXXXXXXXXXEXXXXXXXXXXXXXXXXXXXXXXXXXXXXXXXXXXXXXXXXXXXXKXDXXD

SEQ ID NO: 795765 - protein, 98 aa, unidentified
  VARIANT 2: note = Any amino acid
  VARIANT 3: note = Any amino acid
  VARIANT 4: note = Any amino acid
  VARIANT 5: note = Any amino acid
  VARIANT 6: note = Any amino acid
  VARIANT 7: note = Any amino acid
  VARIANT 8: note = Any amino acid
  VARIANT 9: note = Any amino acid
  VARIANT 10: note = Any amino acid
  VARIANT 11: note = Any amino acid
  VARIANT 12: note = Any amino acid
  VARIANT 13: note = Any amino acid
  VARIANT 14: note = Any amino acid
  VARIANT 15: note = Any amino acid
  VARIANT 16: note = Any amino acid
  VARIANT 17: note = Any amino acid
  VARIANT 18: note = Any amino acid
  VARIANT 19: note = Any amino acid
  VARIANT 20: note = Any amino acid
  VARIANT 21: note = Any amino acid
  VARIANT 22: note = Any amino acid
  VARIANT 23: note = Any amino acid
  VARIANT 24: note = Any amino acid
  VARIANT 25: note = Any amino acid
  VARIANT 26: note = Any amino acid
  VARIANT 27: note = Any amino acid
  VARIANT 28: note = Any amino acid
  VARIANT 29: note = Any amino acid
  VARIANT 30: note = Any amino acid
  VARIANT 31: note = Any amino acid
  VARIANT 32: note = Any amino acid
  VARIANT 33: note = Any amino acid
  VARIANT 34: note = Any amino acid
  VARIANT 35: note = Any amino acid
  VARIANT 36: note = Any amino acid
  VARIANT 37: note = Any amino acid
  VARIANT 38: note = Any amino acid
  VARIANT 39: note = Any amino acid
  VARIANT 40: note = Any amino acid
  VARIANT 41: note = Any amino acid
  VARIANT 42: note = Any amino acid
  VARIANT 43: note = Any amino acid
  VARIANT 44: note = Any amino acid
  VARIANT 45: note = Any amino acid
  VARIANT 46: note = Any amino acid
  VARIANT 47: note = Any amino acid
  VARIANT 48: note = Any amino acid
  VARIANT 49: note = Any amino acid
  VARIANT 50: note = Any amino acid
  VARIANT 51: note = Any amino acid
  VARIANT 53: note = Any amino acid
  VARIANT 54: note = Any amino acid
  VARIANT 55: note = Any amino acid
  VARIANT 56: note = Any amino acid
  VARIANT 57: note = Any amino acid
  VARIANT 58: note = Any amino acid
  VARIANT 59: note = Any amino acid
  VARIANT 60: note = Any amino acid
  VARIANT 61: note = Any amino acid
  VARIANT 62: note = Any amino acid
  VARIANT 63: note = Any amino acid
  VARIANT 64: note = Any amino acid
  VARIANT 65: note = Any amino acid
  VARIANT 66: note = Any amino acid
  VARIANT 67: note = Any amino acid
  VARIANT 68: note = Any amino acid
  VARIANT 69: note = Any amino acid
  VARIANT 70: note = Any amino acid
  VARIANT 71: note = Any amino acid
  VARIANT 72: note = Any amino acid
  VARIANT 73: note = Any amino acid
  VARIANT 74: note = Any amino acid
  VARIANT 75: note = Any amino acid
  VARIANT 76: note = Any amino acid
  VARIANT 77: note = Any amino acid
  VARIANT 78: note = Any amino acid
  VARIANT 79: note = Any amino acid
  VARIANT 80: note = Any amino acid
  VARIANT 81: note = Any amino acid
  VARIANT 82: note = Any amino acid
  VARIANT 83: note = Any amino acid
  VARIANT 84: note = Any amino acid
  VARIANT 85: note = Any amino acid
  VARIANT 86: note = Any amino acid
  VARIANT 87: note = Any amino acid
  VARIANT 88: note = Any amino acid
  VARIANT 89: note = Any amino acid
  VARIANT 90: note = Any amino acid
  VARIANT 91: note = Any amino acid
  VARIANT 92: note = Any amino acid
  VARIANT 94: note = Any amino acid
  VARIANT 96: note = Any amino acid
  VARIANT 97: note = Any amino acid
DXXXXXXXXXXXXXXXXXXXXXXXXXXXXXXXXXXXXXXXXXXXXXXXXXXEXXXXXXXXXXXXXXXXXXXXXXXXXXXXXXXXXXXXXXXXLXDXXS

SEQ ID NO: 795766 - protein, 108 aa, unidentified
  VARIANT 2: note = Any amino acid
  VARIANT 3: note = Any amino acid
  VARIANT 4: note = Any amino acid
  VARIANT 5: note = Any amino acid
  VARIANT 6: note = Any amino acid
  VARIANT 7: note = Any amino acid
  VARIANT 8: note = Any amino acid
  VARIANT 9: note = Any amino acid
  VARIANT 10: note = Any amino acid
  VARIANT 11: note = Any amino acid
  VARIANT 12: note = Any amino acid
  VARIANT 13: note = Any amino acid
  VARIANT 14: note = Any amino acid
  VARIANT 15: note = Any amino acid
  VARIANT 16: note = Any amino acid
  VARIANT 17: note = Any amino acid
  VARIANT 18: note = Any amino acid
  VARIANT 19: note = Any amino acid
  VARIANT 20: note = Any amino acid
  VARIANT 21: note = Any amino acid
  VARIANT 22: note = Any amino acid
  VARIANT 23: note = Any amino acid
  VARIANT 24: note = Any amino acid
  VARIANT 25: note = Any amino acid
  VARIANT 26: note = Any amino acid
  VARIANT 27: note = Any amino acid
  VARIANT 28: note = Any amino acid
  VARIANT 29: note = Any amino acid
  VARIANT 30: note = Any amino acid
  VARIANT 31: note = Any amino acid
  VARIANT 32: note = Any amino acid
  VARIANT 33: note = Any amino acid
  VARIANT 34: note = Any amino acid
  VARIANT 35: note = Any amino acid
  VARIANT 36: note = Any amino acid
  VARIANT 37: note = Any amino acid
  VARIANT 38: note = Any amino acid
  VARIANT 39: note = Any amino acid
  VARIANT 40: note = Any amino acid
  VARIANT 41: note = Any amino acid
  VARIANT 42: note = Any amino acid
  VARIANT 43: note = Any amino acid
  VARIANT 44: note = Any amino acid
  VARIANT 45: note = Any amino acid
  VARIANT 46: note = Any amino acid
  VARIANT 47: note = Any amino acid
  VARIANT 48: note = Any amino acid
  VARIANT 49: note = Any amino acid
  VARIANT 50: note = Any amino acid
  VARIANT 51: note = Any amino acid
  VARIANT 52: note = Any amino acid
  VARIANT 53: note = Any amino acid
  VARIANT 54: note = Any amino acid
  VARIANT 56: note = Any amino acid
  VARIANT 57: note = Any amino acid
  VARIANT 58: note = Any amino acid
  VARIANT 59: note = Any amino acid
  VARIANT 60: note = Any amino acid
  VARIANT 61: note = Any amino acid
  VARIANT 62: note = Any amino acid
  VARIANT 63: note = Any amino acid
  VARIANT 64: note = Any amino acid
  VARIANT 65: note = Any amino acid
  VARIANT 66: note = Any amino acid
  VARIANT 67: note = Any amino acid
  VARIANT 68: note = Any amino acid
  VARIANT 69: note = Any amino acid
  VARIANT 70: note = Any amino acid
  VARIANT 71: note = Any amino acid
  VARIANT 72: note = Any amino acid
  VARIANT 73: note = Any amino acid
  VARIANT 74: note = Any amino acid
  VARIANT 75: note = Any amino acid
  VARIANT 76: note = Any amino acid
  VARIANT 77: note = Any amino acid
  VARIANT 78: note = Any amino acid
  VARIANT 79: note = Any amino acid
  VARIANT 80: note = Any amino acid
  VARIANT 81: note = Any amino acid
  VARIANT 82: note = Any amino acid
  VARIANT 83: note = Any amino acid
  VARIANT 84: note = Any amino acid
  VARIANT 85: note = Any amino acid
  VARIANT 86: note = Any amino acid
  VARIANT 87: note = Any amino acid
  VARIANT 88: note = Any amino acid
  VARIANT 89: note = Any amino acid
  VARIANT 90: note = Any amino acid
  VARIANT 91: note = Any amino acid
  VARIANT 92: note = Any amino acid
  VARIANT 93: note = Any amino acid
  VARIANT 94: note = Any amino acid
  VARIANT 95: note = Any amino acid
  VARIANT 96: note = Any amino acid
  VARIANT 97: note = Any amino acid
  VARIANT 98: note = Any amino acid
  VARIANT 99: note = Any amino acid
  VARIANT 100: note = Any amino acid
  VARIANT 101: note = Any amino acid
  VARIANT 102: note = Any amino acid
  VARIANT 104: note = Any amino acid
  VARIANT 106: note = Any amino acid
  VARIANT 107: note = Any amino acid
DXXXXXXXXXXXXXXXXXXXXXXXXXXXXXXXXXXXXXXXXXXXXXXXXXXXXXEXXXXXXXXXXXXXXXXXXXXXXXXXXXXXXXXXXXXXXXXXXXXXXXKXDXXD

SEQ ID NO: 795767 - protein, 95 aa, unidentified
  VARIANT 2: note = Any amino acid
  VARIANT 3: note = Any amino acid
  VARIANT 4: note = Any amino acid
  VARIANT 5: note = Any amino acid
  VARIANT 6: note = Any amino acid
  VARIANT 7: note = Any amino acid
  VARIANT 8: note = Any amino acid
  VARIANT 9: note = Any amino acid
  VARIANT 10: note = Any amino acid
  VARIANT 11: note = Any amino acid
  VARIANT 12: note = Any amino acid
  VARIANT 13: note = Any amino acid
  VARIANT 14: note = Any amino acid
  VARIANT 15: note = Any amino acid
  VARIANT 16: note = Any amino acid
  VARIANT 17: note = Any amino acid
  VARIANT 18: note = Any amino acid
  VARIANT 19: note = Any amino acid
  VARIANT 20: note = Any amino acid
  VARIANT 21: note = Any amino acid
  VARIANT 22: note = Any amino acid
  VARIANT 23: note = Any amino acid
  VARIANT 24: note = Any amino acid
  VARIANT 25: note = Any amino acid
  VARIANT 26: note = Any amino acid
  VARIANT 27: note = Any amino acid
  VARIANT 28: note = Any amino acid
  VARIANT 29: note = Any amino acid
  VARIANT 30: note = Any amino acid
  VARIANT 31: note = Any amino acid
  VARIANT 32: note = Any amino acid
  VARIANT 33: note = Any amino acid
  VARIANT 34: note = Any amino acid
  VARIANT 35: note = Any amino acid
  VARIANT 36: note = Any amino acid
  VARIANT 37: note = Any amino acid
  VARIANT 38: note = Any amino acid
  VARIANT 39: note = Any amino acid
  VARIANT 40: note = Any amino acid
  VARIANT 41: note = Any amino acid
  VARIANT 42: note = Any amino acid
  VARIANT 43: note = Any amino acid
  VARIANT 44: note = Any amino acid
  VARIANT 45: note = Any amino acid
  VARIANT 46: note = Any amino acid
  VARIANT 47: note = Any amino acid
  VARIANT 48: note = Any amino acid
  VARIANT 50: note = Any amino acid
  VARIANT 51: note = Any amino acid
  VARIANT 52: note = Any amino acid
  VARIANT 53: note = Any amino acid
  VARIANT 54: note = Any amino acid
  VARIANT 55: note = Any amino acid
  VARIANT 56: note = Any amino acid
  VARIANT 57: note = Any amino acid
  VARIANT 58: note = Any amino acid
  VARIANT 59: note = Any amino acid
  VARIANT 60: note = Any amino acid
  VARIANT 61: note = Any amino acid
  VARIANT 62: note = Any amino acid
  VARIANT 63: note = Any amino acid
  VARIANT 64: note = Any amino acid
  VARIANT 65: note = Any amino acid
  VARIANT 66: note = Any amino acid
  VARIANT 67: note = Any amino acid
  VARIANT 68: note = Any amino acid
  VARIANT 69: note = Any amino acid
  VARIANT 70: note = Any amino acid
  VARIANT 71: note = Any amino acid
  VARIANT 72: note = Any amino acid
  VARIANT 73: note = Any amino acid
  VARIANT 74: note = Any amino acid
  VARIANT 75: note = Any amino acid
  VARIANT 76: note = Any amino acid
  VARIANT 77: note = Any amino acid
  VARIANT 78: note = Any amino acid
  VARIANT 79: note = Any amino acid
  VARIANT 80: note = Any amino acid
  VARIANT 81: note = Any amino acid
  VARIANT 82: note = Any amino acid
  VARIANT 83: note = Any amino acid
  VARIANT 84: note = Any amino acid
  VARIANT 85: note = Any amino acid
  VARIANT 86: note = Any amino acid
  VARIANT 87: note = Any amino acid
  VARIANT 88: note = Any amino acid
  VARIANT 89: note = Any amino acid
  VARIANT 91: note = Any amino acid
  VARIANT 93: note = Any amino acid
  VARIANT 94: note = Any amino acid
DXXXXXXXXXXXXXXXXXXXXXXXXXXXXXXXXXXXXXXXXXXXXXXXAXXXXXXXXXXXXXXXXXXXXXXXXXXXXXXXXXXXXXXXXSXDXXD

SEQ ID NO: 795768 - protein, 96 aa, unidentified
  VARIANT 2: note = Any amino acid
  VARIANT 3: note = Any amino acid
  VARIANT 4: note = Any amino acid
  VARIANT 5: note = Any amino acid
  VARIANT 6: note = Any amino acid
  VARIANT 7: note = Any amino acid
  VARIANT 8: note = Any amino acid
  VARIANT 9: note = Any amino acid
  VARIANT 10: note = Any amino acid
  VARIANT 11: note = Any amino acid
  VARIANT 12: note = Any amino acid
  VARIANT 13: note = Any amino acid
  VARIANT 14: note = Any amino acid
  VARIANT 15: note = Any amino acid
  VARIANT 16: note = Any amino acid
  VARIANT 17: note = Any amino acid
  VARIANT 18: note = Any amino acid
  VARIANT 19: note = Any amino acid
  VARIANT 20: note = Any amino acid
  VARIANT 21: note = Any amino acid
  VARIANT 22: note = Any amino acid
  VARIANT 23: note = Any amino acid
  VARIANT 24: note = Any amino acid
  VARIANT 25: note = Any amino acid
  VARIANT 26: note = Any amino acid
  VARIANT 27: note = Any amino acid
  VARIANT 28: note = Any amino acid
  VARIANT 29: note = Any amino acid
  VARIANT 30: note = Any amino acid
  VARIANT 31: note = Any amino acid
  VARIANT 32: note = Any amino acid
  VARIANT 33: note = Any amino acid
  VARIANT 34: note = Any amino acid
  VARIANT 35: note = Any amino acid
  VARIANT 36: note = Any amino acid
  VARIANT 37: note = Any amino acid
  VARIANT 38: note = Any amino acid
  VARIANT 39: note = Any amino acid
  VARIANT 40: note = Any amino acid
  VARIANT 41: note = Any amino acid
  VARIANT 42: note = Any amino acid
  VARIANT 43: note = Any amino acid
  VARIANT 44: note = Any amino acid
  VARIANT 45: note = Any amino acid
  VARIANT 46: note = Any amino acid
  VARIANT 47: note = Any amino acid
  VARIANT 48: note = Any amino acid
  VARIANT 49: note = Any amino acid
  VARIANT 50: note = Any amino acid
  VARIANT 52: note = Any amino acid
  VARIANT 53: note = Any amino acid
  VARIANT 54: note = Any amino acid
  VARIANT 55: note = Any amino acid
  VARIANT 56: note = Any amino acid
  VARIANT 57: note = Any amino acid
  VARIANT 58: note = Any amino acid
  VARIANT 59: note = Any amino acid
  VARIANT 60: note = Any amino acid
  VARIANT 61: note = Any amino acid
  VARIANT 62: note = Any amino acid
  VARIANT 63: note = Any amino acid
  VARIANT 64: note = Any amino acid
  VARIANT 65: note = Any amino acid
  VARIANT 66: note = Any amino acid
  VARIANT 67: note = Any amino acid
  VARIANT 68: note = Any amino acid
  VARIANT 69: note = Any amino acid
  VARIANT 70: note = Any amino acid
  VARIANT 71: note = Any amino acid
  VARIANT 72: note = Any amino acid
  VARIANT 73: note = Any amino acid
  VARIANT 74: note = Any amino acid
  VARIANT 75: note = Any amino acid
  VARIANT 76: note = Any amino acid
  VARIANT 77: note = Any amino acid
  VARIANT 78: note = Any amino acid
  VARIANT 79: note = Any amino acid
  VARIANT 80: note = Any amino acid
  VARIANT 81: note = Any amino acid
  VARIANT 82: note = Any amino acid
  VARIANT 83: note = Any amino acid
  VARIANT 84: note = Any amino acid
  VARIANT 85: note = Any amino acid
  VARIANT 86: note = Any amino acid
  VARIANT 87: note = Any amino acid
  VARIANT 88: note = Any amino acid
  VARIANT 89: note = Any amino acid
  VARIANT 90: note = Any amino acid
  VARIANT 92: note = Any amino acid
  VARIANT 94: note = Any amino acid
  VARIANT 95: note = Any amino acid
DXXXXXXXXXXXXXXXXXXXXXXXXXXXXXXXXXXXXXXXXXXXXXXXXXEXXXXXXXXXXXXXXXXXXXXXXXXXXXXXXXXXXXXXXXRXDXXD

SEQ ID NO: 795769 - protein, 97 aa, unidentified
  VARIANT 2: note = Any amino acid
  VARIANT 3: note = Any amino acid
  VARIANT 4: note = Any amino acid
  VARIANT 5: note = Any amino acid
  VARIANT 6: note = Any amino acid
  VARIANT 7: note = Any amino acid
  VARIANT 8: note = Any amino acid
  VARIANT 9: note = Any amino acid
  VARIANT 10: note = Any amino acid
  VARIANT 11: note = Any amino acid
  VARIANT 12: note = Any amino acid
  VARIANT 13: note = Any amino acid
  VARIANT 14: note = Any amino acid
  VARIANT 15: note = Any amino acid
  VARIANT 16: note = Any amino acid
  VARIANT 17: note = Any amino acid
  VARIANT 18: note = Any amino acid
  VARIANT 19: note = Any amino acid
  VARIANT 20: note = Any amino acid
  VARIANT 21: note = Any amino acid
  VARIANT 22: note = Any amino acid
  VARIANT 23: note = Any amino acid
  VARIANT 24: note = Any amino acid
  VARIANT 25: note = Any amino acid
  VARIANT 26: note = Any amino acid
  VARIANT 27: note = Any amino acid
  VARIANT 28: note = Any amino acid
  VARIANT 29: note = Any amino acid
  VARIANT 30: note = Any amino acid
  VARIANT 31: note = Any amino acid
  VARIANT 32: note = Any amino acid
  VARIANT 33: note = Any amino acid
  VARIANT 34: note = Any amino acid
  VARIANT 35: note = Any amino acid
  VARIANT 36: note = Any amino acid
  VARIANT 37: note = Any amino acid
  VARIANT 38: note = Any amino acid
  VARIANT 39: note = Any amino acid
  VARIANT 40: note = Any amino acid
  VARIANT 41: note = Any amino acid
  VARIANT 42: note = Any amino acid
  VARIANT 43: note = Any amino acid
  VARIANT 44: note = Any amino acid
  VARIANT 45: note = Any amino acid
  VARIANT 46: note = Any amino acid
  VARIANT 47: note = Any amino acid
  VARIANT 48: note = Any amino acid
  VARIANT 49: note = Any amino acid
  VARIANT 50: note = Any amino acid
  VARIANT 52: note = Any amino acid
  VARIANT 53: note = Any amino acid
  VARIANT 54: note = Any amino acid
  VARIANT 55: note = Any amino acid
  VARIANT 56: note = Any amino acid
  VARIANT 57: note = Any amino acid
  VARIANT 58: note = Any amino acid
  VARIANT 59: note = Any amino acid
  VARIANT 60: note = Any amino acid
  VARIANT 61: note = Any amino acid
  VARIANT 62: note = Any amino acid
  VARIANT 63: note = Any amino acid
  VARIANT 64: note = Any amino acid
  VARIANT 65: note = Any amino acid
  VARIANT 66: note = Any amino acid
  VARIANT 67: note = Any amino acid
  VARIANT 68: note = Any amino acid
  VARIANT 69: note = Any amino acid
  VARIANT 70: note = Any amino acid
  VARIANT 71: note = Any amino acid
  VARIANT 72: note = Any amino acid
  VARIANT 73: note = Any amino acid
  VARIANT 74: note = Any amino acid
  VARIANT 75: note = Any amino acid
  VARIANT 76: note = Any amino acid
  VARIANT 77: note = Any amino acid
  VARIANT 78: note = Any amino acid
  VARIANT 79: note = Any amino acid
  VARIANT 80: note = Any amino acid
  VARIANT 81: note = Any amino acid
  VARIANT 82: note = Any amino acid
  VARIANT 83: note = Any amino acid
  VARIANT 84: note = Any amino acid
  VARIANT 85: note = Any amino acid
  VARIANT 86: note = Any amino acid
  VARIANT 87: note = Any amino acid
  VARIANT 88: note = Any amino acid
  VARIANT 89: note = Any amino acid
  VARIANT 90: note = Any amino acid
  VARIANT 91: note = Any amino acid
  VARIANT 93: note = Any amino acid
  VARIANT 95: note = Any amino acid
  VARIANT 96: note = Any amino acid
DXXXXXXXXXXXXXXXXXXXXXXXXXXXXXXXXXXXXXXXXXXXXXXXXXGXXXXXXXXXXXXXXXXXXXXXXXXXXXXXXXXXXXXXXXXKXDXXD

SEQ ID NO: 795770 - protein, 106 aa, unidentified
  VARIANT 2: note = Any amino acid
  VARIANT 3: note = Any amino acid
  VARIANT 4: note = Any amino acid
  VARIANT 5: note = Any amino acid
  VARIANT 6: note = Any amino acid
  VARIANT 7: note = Any amino acid
  VARIANT 8: note = Any amino acid
  VARIANT 9: note = Any amino acid
  VARIANT 10: note = Any amino acid
  VARIANT 11: note = Any amino acid
  VARIANT 12: note = Any amino acid
  VARIANT 13: note = Any amino acid
  VARIANT 14: note = Any amino acid
  VARIANT 15: note = Any amino acid
  VARIANT 16: note = Any amino acid
  VARIANT 17: note = Any amino acid
  VARIANT 18: note = Any amino acid
  VARIANT 19: note = Any amino acid
  VARIANT 20: note = Any amino acid
  VARIANT 21: note = Any amino acid
  VARIANT 22: note = Any amino acid
  VARIANT 23: note = Any amino acid
  VARIANT 24: note = Any amino acid
  VARIANT 25: note = Any amino acid
  VARIANT 26: note = Any amino acid
  VARIANT 27: note = Any amino acid
  VARIANT 28: note = Any amino acid
  VARIANT 29: note = Any amino acid
  VARIANT 30: note = Any amino acid
  VARIANT 31: note = Any amino acid
  VARIANT 32: note = Any amino acid
  VARIANT 33: note = Any amino acid
  VARIANT 34: note = Any amino acid
  VARIANT 35: note = Any amino acid
  VARIANT 36: note = Any amino acid
  VARIANT 37: note = Any amino acid
  VARIANT 38: note = Any amino acid
  VARIANT 39: note = Any amino acid
  VARIANT 40: note = Any amino acid
  VARIANT 41: note = Any amino acid
  VARIANT 42: note = Any amino acid
  VARIANT 43: note = Any amino acid
  VARIANT 44: note = Any amino acid
  VARIANT 45: note = Any amino acid
  VARIANT 46: note = Any amino acid
  VARIANT 47: note = Any amino acid
  VARIANT 48: note = Any amino acid
  VARIANT 49: note = Any amino acid
  VARIANT 50: note = Any amino acid
  VARIANT 51: note = Any amino acid
  VARIANT 52: note = Any amino acid
  VARIANT 53: note = Any amino acid
  VARIANT 54: note = Any amino acid
  VARIANT 55: note = Any amino acid
  VARIANT 56: note = Any amino acid
  VARIANT 57: note = Any amino acid
  VARIANT 58: note = Any amino acid
  VARIANT 59: note = Any amino acid
  VARIANT 61: note = Any amino acid
  VARIANT 62: note = Any amino acid
  VARIANT 63: note = Any amino acid
  VARIANT 64: note = Any amino acid
  VARIANT 65: note = Any amino acid
  VARIANT 66: note = Any amino acid
  VARIANT 67: note = Any amino acid
  VARIANT 68: note = Any amino acid
  VARIANT 69: note = Any amino acid
  VARIANT 70: note = Any amino acid
  VARIANT 71: note = Any amino acid
  VARIANT 72: note = Any amino acid
  VARIANT 73: note = Any amino acid
  VARIANT 74: note = Any amino acid
  VARIANT 75: note = Any amino acid
  VARIANT 76: note = Any amino acid
  VARIANT 77: note = Any amino acid
  VARIANT 78: note = Any amino acid
  VARIANT 79: note = Any amino acid
  VARIANT 80: note = Any amino acid
  VARIANT 81: note = Any amino acid
  VARIANT 82: note = Any amino acid
  VARIANT 83: note = Any amino acid
  VARIANT 84: note = Any amino acid
  VARIANT 85: note = Any amino acid
  VARIANT 86: note = Any amino acid
  VARIANT 87: note = Any amino acid
  VARIANT 88: note = Any amino acid
  VARIANT 89: note = Any amino acid
  VARIANT 90: note = Any amino acid
  VARIANT 91: note = Any amino acid
  VARIANT 92: note = Any amino acid
  VARIANT 93: note = Any amino acid
  VARIANT 94: note = Any amino acid
  VARIANT 95: note = Any amino acid
  VARIANT 96: note = Any amino acid
  VARIANT 97: note = Any amino acid
  VARIANT 98: note = Any amino acid
  VARIANT 99: note = Any amino acid
  VARIANT 100: note = Any amino acid
  VARIANT 102: note = Any amino acid
  VARIANT 104: note = Any amino acid
  VARIANT 105: note = Any amino acid
DXXXXXXXXXXXXXXXXXXXXXXXXXXXXXXXXXXXXXXXXXXXXXXXXXXXXXXXXXXEXXXXXXXXXXXXXXXXXXXXXXXXXXXXXXXXXXXXXXXXAXDXXD

SEQ ID NO: 795771 - protein, 110 aa, unidentified
  VARIANT 2: note = Any amino acid
  VARIANT 3: note = Any amino acid
  VARIANT 4: note = Any amino acid
  VARIANT 5: note = Any amino acid
  VARIANT 6: note = Any amino acid
  VARIANT 7: note = Any amino acid
  VARIANT 8: note = Any amino acid
  VARIANT 9: note = Any amino acid
  VARIANT 10: note = Any amino acid
  VARIANT 11: note = Any amino acid
  VARIANT 12: note = Any amino acid
  VARIANT 13: note = Any amino acid
  VARIANT 14: note = Any amino acid
  VARIANT 15: note = Any amino acid
  VARIANT 16: note = Any amino acid
  VARIANT 17: note = Any amino acid
  VARIANT 18: note = Any amino acid
  VARIANT 19: note = Any amino acid
  VARIANT 20: note = Any amino acid
  VARIANT 21: note = Any amino acid
  VARIANT 22: note = Any amino acid
  VARIANT 23: note = Any amino acid
  VARIANT 24: note = Any amino acid
  VARIANT 25: note = Any amino acid
  VARIANT 26: note = Any amino acid
  VARIANT 27: note = Any amino acid
  VARIANT 28: note = Any amino acid
  VARIANT 29: note = Any amino acid
  VARIANT 30: note = Any amino acid
  VARIANT 31: note = Any amino acid
  VARIANT 32: note = Any amino acid
  VARIANT 33: note = Any amino acid
  VARIANT 34: note = Any amino acid
  VARIANT 35: note = Any amino acid
  VARIANT 36: note = Any amino acid
  VARIANT 37: note = Any amino acid
  VARIANT 38: note = Any amino acid
  VARIANT 39: note = Any amino acid
  VARIANT 40: note = Any amino acid
  VARIANT 41: note = Any amino acid
  VARIANT 42: note = Any amino acid
  VARIANT 43: note = Any amino acid
  VARIANT 44: note = Any amino acid
  VARIANT 45: note = Any amino acid
  VARIANT 46: note = Any amino acid
  VARIANT 47: note = Any amino acid
  VARIANT 48: note = Any amino acid
  VARIANT 49: note = Any amino acid
  VARIANT 50: note = Any amino acid
  VARIANT 51: note = Any amino acid
  VARIANT 52: note = Any amino acid
  VARIANT 53: note = Any amino acid
  VARIANT 54: note = Any amino acid
  VARIANT 55: note = Any amino acid
  VARIANT 56: note = Any amino acid
  VARIANT 57: note = Any amino acid
  VARIANT 58: note = Any amino acid
  VARIANT 59: note = Any amino acid
  VARIANT 60: note = Any amino acid
  VARIANT 61: note = Any amino acid
  VARIANT 62: note = Any amino acid
  VARIANT 64: note = Any amino acid
  VARIANT 65: note = Any amino acid
  VARIANT 66: note = Any amino acid
  VARIANT 67: note = Any amino acid
  VARIANT 68: note = Any amino acid
  VARIANT 69: note = Any amino acid
  VARIANT 70: note = Any amino acid
  VARIANT 71: note = Any amino acid
  VARIANT 72: note = Any amino acid
  VARIANT 73: note = Any amino acid
  VARIANT 74: note = Any amino acid
  VARIANT 75: note = Any amino acid
  VARIANT 76: note = Any amino acid
  VARIANT 77: note = Any amino acid
  VARIANT 78: note = Any amino acid
  VARIANT 79: note = Any amino acid
  VARIANT 80: note = Any amino acid
  VARIANT 81: note = Any amino acid
  VARIANT 82: note = Any amino acid
  VARIANT 83: note = Any amino acid
  VARIANT 84: note = Any amino acid
  VARIANT 85: note = Any amino acid
  VARIANT 86: note = Any amino acid
  VARIANT 87: note = Any amino acid
  VARIANT 88: note = Any amino acid
  VARIANT 89: note = Any amino acid
  VARIANT 90: note = Any amino acid
  VARIANT 91: note = Any amino acid
  VARIANT 92: note = Any amino acid
  VARIANT 93: note = Any amino acid
  VARIANT 94: note = Any amino acid
  VARIANT 95: note = Any amino acid
  VARIANT 96: note = Any amino acid
  VARIANT 97: note = Any amino acid
  VARIANT 98: note = Any amino acid
  VARIANT 99: note = Any amino acid
  VARIANT 100: note = Any amino acid
  VARIANT 101: note = Any amino acid
  VARIANT 102: note = Any amino acid
  VARIANT 103: note = Any amino acid
  VARIANT 104: note = Any amino acid
  VARIANT 106: note = Any amino acid
  VARIANT 108: note = Any amino acid
  VARIANT 109: note = Any amino acid
DXXXXXXXXXXXXXXXXXXXXXXXXXXXXXXXXXXXXXXXXXXXXXXXXXXXXXXXXXXXXXEXXXXXXXXXXXXXXXXXXXXXXXXXXXXXXXXXXXXXXXXXKXDXXE

SEQ ID NO: 795772 - protein, 90 aa, unidentified
  VARIANT 2: note = Any amino acid
  VARIANT 3: note = Any amino acid
  VARIANT 4: note = Any amino acid
  VARIANT 5: note = Any amino acid
  VARIANT 6: note = Any amino acid
  VARIANT 7: note = Any amino acid
  VARIANT 8: note = Any amino acid
  VARIANT 9: note = Any amino acid
  VARIANT 10: note = Any amino acid
  VARIANT 11: note = Any amino acid
  VARIANT 12: note = Any amino acid
  VARIANT 13: note = Any amino acid
  VARIANT 14: note = Any amino acid
  VARIANT 15: note = Any amino acid
  VARIANT 16: note = Any amino acid
  VARIANT 17: note = Any amino acid
  VARIANT 18: note = Any amino acid
  VARIANT 19: note = Any amino acid
  VARIANT 20: note = Any amino acid
  VARIANT 21: note = Any amino acid
  VARIANT 22: note = Any amino acid
  VARIANT 23: note = Any amino acid
  VARIANT 24: note = Any amino acid
  VARIANT 25: note = Any amino acid
  VARIANT 26: note = Any amino acid
  VARIANT 27: note = Any amino acid
  VARIANT 28: note = Any amino acid
  VARIANT 29: note = Any amino acid
  VARIANT 30: note = Any amino acid
  VARIANT 31: note = Any amino acid
  VARIANT 32: note = Any amino acid
  VARIANT 33: note = Any amino acid
  VARIANT 34: note = Any amino acid
  VARIANT 35: note = Any amino acid
  VARIANT 36: note = Any amino acid
  VARIANT 37: note = Any amino acid
  VARIANT 38: note = Any amino acid
  VARIANT 39: note = Any amino acid
  VARIANT 40: note = Any amino acid
  VARIANT 41: note = Any amino acid
  VARIANT 42: note = Any amino acid
  VARIANT 43: note = Any amino acid
  VARIANT 44: note = Any amino acid
  VARIANT 45: note = Any amino acid
  VARIANT 46: note = Any amino acid
  VARIANT 47: note = Any amino acid
  VARIANT 49: note = Any amino acid
  VARIANT 50: note = Any amino acid
  VARIANT 51: note = Any amino acid
  VARIANT 52: note = Any amino acid
  VARIANT 53: note = Any amino acid
  VARIANT 54: note = Any amino acid
  VARIANT 55: note = Any amino acid
  VARIANT 56: note = Any amino acid
  VARIANT 57: note = Any amino acid
  VARIANT 58: note = Any amino acid
  VARIANT 59: note = Any amino acid
  VARIANT 60: note = Any amino acid
  VARIANT 61: note = Any amino acid
  VARIANT 62: note = Any amino acid
  VARIANT 63: note = Any amino acid
  VARIANT 64: note = Any amino acid
  VARIANT 65: note = Any amino acid
  VARIANT 66: note = Any amino acid
  VARIANT 67: note = Any amino acid
  VARIANT 68: note = Any amino acid
  VARIANT 69: note = Any amino acid
  VARIANT 70: note = Any amino acid
  VARIANT 71: note = Any amino acid
  VARIANT 72: note = Any amino acid
  VARIANT 73: note = Any amino acid
  VARIANT 74: note = Any amino acid
  VARIANT 75: note = Any amino acid
  VARIANT 76: note = Any amino acid
  VARIANT 77: note = Any amino acid
  VARIANT 78: note = Any amino acid
  VARIANT 79: note = Any amino acid
  VARIANT 80: note = Any amino acid
  VARIANT 81: note = Any amino acid
  VARIANT 82: note = Any amino acid
  VARIANT 83: note = Any amino acid
  VARIANT 84: note = Any amino acid
  VARIANT 86: note = Any amino acid
  VARIANT 88: note = Any amino acid
  VARIANT 89: note = Any amino acid
DXXXXXXXXXXXXXXXXXXXXXXXXXXXXXXXXXXXXXXXXXXXXXXEXXXXXXXXXXXXXXXXXXXXXXXXXXXXXXXXXXXXKXDXXD

SEQ ID NO: 795773 - protein, 94 aa, unidentified
  VARIANT 2: note = Any amino acid
  VARIANT 3: note = Any amino acid
  VARIANT 4: note = Any amino acid
  VARIANT 5: note = Any amino acid
  VARIANT 6: note = Any amino acid
  VARIANT 7: note = Any amino acid
  VARIANT 8: note = Any amino acid
  VARIANT 9: note = Any amino acid
  VARIANT 10: note = Any amino acid
  VARIANT 11: note = Any amino acid
  VARIANT 12: note = Any amino acid
  VARIANT 13: note = Any amino acid
  VARIANT 14: note = Any amino acid
  VARIANT 15: note = Any amino acid
  VARIANT 16: note = Any amino acid
  VARIANT 17: note = Any amino acid
  VARIANT 18: note = Any amino acid
  VARIANT 19: note = Any amino acid
  VARIANT 20: note = Any amino acid
  VARIANT 21: note = Any amino acid
  VARIANT 22: note = Any amino acid
  VARIANT 23: note = Any amino acid
  VARIANT 24: note = Any amino acid
  VARIANT 25: note = Any amino acid
  VARIANT 26: note = Any amino acid
  VARIANT 27: note = Any amino acid
  VARIANT 28: note = Any amino acid
  VARIANT 29: note = Any amino acid
  VARIANT 30: note = Any amino acid
  VARIANT 31: note = Any amino acid
  VARIANT 32: note = Any amino acid
  VARIANT 33: note = Any amino acid
  VARIANT 34: note = Any amino acid
  VARIANT 35: note = Any amino acid
  VARIANT 36: note = Any amino acid
  VARIANT 37: note = Any amino acid
  VARIANT 38: note = Any amino acid
  VARIANT 39: note = Any amino acid
  VARIANT 40: note = Any amino acid
  VARIANT 41: note = Any amino acid
  VARIANT 42: note = Any amino acid
  VARIANT 43: note = Any amino acid
  VARIANT 44: note = Any amino acid
  VARIANT 45: note = Any amino acid
  VARIANT 46: note = Any amino acid
  VARIANT 47: note = Any amino acid
  VARIANT 48: note = Any amino acid
  VARIANT 50: note = Any amino acid
  VARIANT 51: note = Any amino acid
  VARIANT 52: note = Any amino acid
  VARIANT 53: note = Any amino acid
  VARIANT 54: note = Any amino acid
  VARIANT 55: note = Any amino acid
  VARIANT 56: note = Any amino acid
  VARIANT 57: note = Any amino acid
  VARIANT 58: note = Any amino acid
  VARIANT 59: note = Any amino acid
  VARIANT 60: note = Any amino acid
  VARIANT 61: note = Any amino acid
  VARIANT 62: note = Any amino acid
  VARIANT 63: note = Any amino acid
  VARIANT 64: note = Any amino acid
  VARIANT 65: note = Any amino acid
  VARIANT 66: note = Any amino acid
  VARIANT 67: note = Any amino acid
  VARIANT 68: note = Any amino acid
  VARIANT 69: note = Any amino acid
  VARIANT 70: note = Any amino acid
  VARIANT 71: note = Any amino acid
  VARIANT 72: note = Any amino acid
  VARIANT 73: note = Any amino acid
  VARIANT 74: note = Any amino acid
  VARIANT 75: note = Any amino acid
  VARIANT 76: note = Any amino acid
  VARIANT 77: note = Any amino acid
  VARIANT 78: note = Any amino acid
  VARIANT 79: note = Any amino acid
  VARIANT 80: note = Any amino acid
  VARIANT 81: note = Any amino acid
  VARIANT 82: note = Any amino acid
  VARIANT 83: note = Any amino acid
  VARIANT 84: note = Any amino acid
  VARIANT 85: note = Any amino acid
  VARIANT 86: note = Any amino acid
  VARIANT 87: note = Any amino acid
  VARIANT 88: note = Any amino acid
  VARIANT 90: note = Any amino acid
  VARIANT 92: note = Any amino acid
  VARIANT 93: note = Any amino acid
DXXXXXXXXXXXXXXXXXXXXXXXXXXXXXXXXXXXXXXXXXXXXXXXAXXXXXXXXXXXXXXXXXXXXXXXXXXXXXXXXXXXXXXXKXDXXD

SEQ ID NO: 795774 - protein, 105 aa, unidentified
  VARIANT 2: note = Any amino acid
  VARIANT 3: note = Any amino acid
  VARIANT 4: note = Any amino acid
  VARIANT 5: note = Any amino acid
  VARIANT 6: note = Any amino acid
  VARIANT 7: note = Any amino acid
  VARIANT 8: note = Any amino acid
  VARIANT 9: note = Any amino acid
  VARIANT 10: note = Any amino acid
  VARIANT 11: note = Any amino acid
  VARIANT 12: note = Any amino acid
  VARIANT 13: note = Any amino acid
  VARIANT 14: note = Any amino acid
  VARIANT 15: note = Any amino acid
  VARIANT 16: note = Any amino acid
  VARIANT 17: note = Any amino acid
  VARIANT 18: note = Any amino acid
  VARIANT 19: note = Any amino acid
  VARIANT 20: note = Any amino acid
  VARIANT 21: note = Any amino acid
  VARIANT 22: note = Any amino acid
  VARIANT 23: note = Any amino acid
  VARIANT 24: note = Any amino acid
  VARIANT 25: note = Any amino acid
  VARIANT 26: note = Any amino acid
  VARIANT 27: note = Any amino acid
  VARIANT 28: note = Any amino acid
  VARIANT 29: note = Any amino acid
  VARIANT 30: note = Any amino acid
  VARIANT 31: note = Any amino acid
  VARIANT 32: note = Any amino acid
  VARIANT 33: note = Any amino acid
  VARIANT 34: note = Any amino acid
  VARIANT 35: note = Any amino acid
  VARIANT 36: note = Any amino acid
  VARIANT 37: note = Any amino acid
  VARIANT 38: note = Any amino acid
  VARIANT 39: note = Any amino acid
  VARIANT 40: note = Any amino acid
  VARIANT 41: note = Any amino acid
  VARIANT 42: note = Any amino acid
  VARIANT 43: note = Any amino acid
  VARIANT 44: note = Any amino acid
  VARIANT 45: note = Any amino acid
  VARIANT 46: note = Any amino acid
  VARIANT 47: note = Any amino acid
  VARIANT 48: note = Any amino acid
  VARIANT 49: note = Any amino acid
  VARIANT 50: note = Any amino acid
  VARIANT 51: note = Any amino acid
  VARIANT 52: note = Any amino acid
  VARIANT 53: note = Any amino acid
  VARIANT 54: note = Any amino acid
  VARIANT 55: note = Any amino acid
  VARIANT 56: note = Any amino acid
  VARIANT 58: note = Any amino acid
  VARIANT 59: note = Any amino acid
  VARIANT 60: note = Any amino acid
  VARIANT 61: note = Any amino acid
  VARIANT 62: note = Any amino acid
  VARIANT 63: note = Any amino acid
  VARIANT 64: note = Any amino acid
  VARIANT 65: note = Any amino acid
  VARIANT 66: note = Any amino acid
  VARIANT 67: note = Any amino acid
  VARIANT 68: note = Any amino acid
  VARIANT 69: note = Any amino acid
  VARIANT 70: note = Any amino acid
  VARIANT 71: note = Any amino acid
  VARIANT 72: note = Any amino acid
  VARIANT 73: note = Any amino acid
  VARIANT 74: note = Any amino acid
  VARIANT 75: note = Any amino acid
  VARIANT 76: note = Any amino acid
  VARIANT 77: note = Any amino acid
  VARIANT 78: note = Any amino acid
  VARIANT 79: note = Any amino acid
  VARIANT 80: note = Any amino acid
  VARIANT 81: note = Any amino acid
  VARIANT 82: note = Any amino acid
  VARIANT 83: note = Any amino acid
  VARIANT 84: note = Any amino acid
  VARIANT 85: note = Any amino acid
  VARIANT 86: note = Any amino acid
  VARIANT 87: note = Any amino acid
  VARIANT 88: note = Any amino acid
  VARIANT 89: note = Any amino acid
  VARIANT 90: note = Any amino acid
  VARIANT 91: note = Any amino acid
  VARIANT 92: note = Any amino acid
  VARIANT 93: note = Any amino acid
  VARIANT 94: note = Any amino acid
  VARIANT 95: note = Any amino acid
  VARIANT 96: note = Any amino acid
  VARIANT 97: note = Any amino acid
  VARIANT 98: note = Any amino acid
  VARIANT 99: note = Any amino acid
  VARIANT 101: note = Any amino acid
  VARIANT 103: note = Any amino acid
  VARIANT 104: note = Any amino acid
DXXXXXXXXXXXXXXXXXXXXXXXXXXXXXXXXXXXXXXXXXXXXXXXXXXXXXXXEXXXXXXXXXXXXXXXXXXXXXXXXXXXXXXXXXXXXXXXXXXKXDXXD

SEQ ID NO: 795775 - protein, 106 aa, unidentified
  VARIANT 2: note = Any amino acid
  VARIANT 3: note = Any amino acid
  VARIANT 4: note = Any amino acid
  VARIANT 5: note = Any amino acid
  VARIANT 6: note = Any amino acid
  VARIANT 7: note = Any amino acid
  VARIANT 8: note = Any amino acid
  VARIANT 9: note = Any amino acid
  VARIANT 10: note = Any amino acid
  VARIANT 11: note = Any amino acid
  VARIANT 12: note = Any amino acid
  VARIANT 13: note = Any amino acid
  VARIANT 14: note = Any amino acid
  VARIANT 15: note = Any amino acid
  VARIANT 16: note = Any amino acid
  VARIANT 17: note = Any amino acid
  VARIANT 18: note = Any amino acid
  VARIANT 19: note = Any amino acid
  VARIANT 20: note = Any amino acid
  VARIANT 21: note = Any amino acid
  VARIANT 22: note = Any amino acid
  VARIANT 23: note = Any amino acid
  VARIANT 24: note = Any amino acid
  VARIANT 25: note = Any amino acid
  VARIANT 26: note = Any amino acid
  VARIANT 27: note = Any amino acid
  VARIANT 28: note = Any amino acid
  VARIANT 29: note = Any amino acid
  VARIANT 30: note = Any amino acid
  VARIANT 31: note = Any amino acid
  VARIANT 32: note = Any amino acid
  VARIANT 33: note = Any amino acid
  VARIANT 34: note = Any amino acid
  VARIANT 35: note = Any amino acid
  VARIANT 36: note = Any amino acid
  VARIANT 37: note = Any amino acid
  VARIANT 38: note = Any amino acid
  VARIANT 39: note = Any amino acid
  VARIANT 40: note = Any amino acid
  VARIANT 41: note = Any amino acid
  VARIANT 42: note = Any amino acid
  VARIANT 43: note = Any amino acid
  VARIANT 44: note = Any amino acid
  VARIANT 45: note = Any amino acid
  VARIANT 46: note = Any amino acid
  VARIANT 47: note = Any amino acid
  VARIANT 48: note = Any amino acid
  VARIANT 49: note = Any amino acid
  VARIANT 50: note = Any amino acid
  VARIANT 51: note = Any amino acid
  VARIANT 52: note = Any amino acid
  VARIANT 53: note = Any amino acid
  VARIANT 54: note = Any amino acid
  VARIANT 55: note = Any amino acid
  VARIANT 56: note = Any amino acid
  VARIANT 57: note = Any amino acid
  VARIANT 58: note = Any amino acid
  VARIANT 59: note = Any amino acid
  VARIANT 60: note = Any amino acid
  VARIANT 61: note = Any amino acid
  VARIANT 62: note = Any amino acid
  VARIANT 64: note = Any amino acid
  VARIANT 65: note = Any amino acid
  VARIANT 66: note = Any amino acid
  VARIANT 67: note = Any amino acid
  VARIANT 68: note = Any amino acid
  VARIANT 69: note = Any amino acid
  VARIANT 70: note = Any amino acid
  VARIANT 71: note = Any amino acid
  VARIANT 72: note = Any amino acid
  VARIANT 73: note = Any amino acid
  VARIANT 74: note = Any amino acid
  VARIANT 75: note = Any amino acid
  VARIANT 76: note = Any amino acid
  VARIANT 77: note = Any amino acid
  VARIANT 78: note = Any amino acid
  VARIANT 79: note = Any amino acid
  VARIANT 80: note = Any amino acid
  VARIANT 81: note = Any amino acid
  VARIANT 82: note = Any amino acid
  VARIANT 83: note = Any amino acid
  VARIANT 84: note = Any amino acid
  VARIANT 85: note = Any amino acid
  VARIANT 86: note = Any amino acid
  VARIANT 87: note = Any amino acid
  VARIANT 88: note = Any amino acid
  VARIANT 89: note = Any amino acid
  VARIANT 90: note = Any amino acid
  VARIANT 91: note = Any amino acid
  VARIANT 92: note = Any amino acid
  VARIANT 93: note = Any amino acid
  VARIANT 94: note = Any amino acid
  VARIANT 95: note = Any amino acid
  VARIANT 96: note = Any amino acid
  VARIANT 97: note = Any amino acid
  VARIANT 98: note = Any amino acid
  VARIANT 99: note = Any amino acid
  VARIANT 100: note = Any amino acid
  VARIANT 102: note = Any amino acid
  VARIANT 104: note = Any amino acid
  VARIANT 105: note = Any amino acid
DXXXXXXXXXXXXXXXXXXXXXXXXXXXXXXXXXXXXXXXXXXXXXXXXXXXXXXXXXXXXXEXXXXXXXXXXXXXXXXXXXXXXXXXXXXXXXXXXXXXKXDXXD

SEQ ID NO: 795776 - protein, 93 aa, unidentified
  VARIANT 2: note = Any amino acid
  VARIANT 3: note = Any amino acid
  VARIANT 4: note = Any amino acid
  VARIANT 5: note = Any amino acid
  VARIANT 6: note = Any amino acid
  VARIANT 7: note = Any amino acid
  VARIANT 8: note = Any amino acid
  VARIANT 9: note = Any amino acid
  VARIANT 10: note = Any amino acid
  VARIANT 11: note = Any amino acid
  VARIANT 12: note = Any amino acid
  VARIANT 13: note = Any amino acid
  VARIANT 14: note = Any amino acid
  VARIANT 15: note = Any amino acid
  VARIANT 16: note = Any amino acid
  VARIANT 17: note = Any amino acid
  VARIANT 18: note = Any amino acid
  VARIANT 19: note = Any amino acid
  VARIANT 20: note = Any amino acid
  VARIANT 21: note = Any amino acid
  VARIANT 22: note = Any amino acid
  VARIANT 23: note = Any amino acid
  VARIANT 24: note = Any amino acid
  VARIANT 25: note = Any amino acid
  VARIANT 26: note = Any amino acid
  VARIANT 27: note = Any amino acid
  VARIANT 28: note = Any amino acid
  VARIANT 29: note = Any amino acid
  VARIANT 30: note = Any amino acid
  VARIANT 31: note = Any amino acid
  VARIANT 32: note = Any amino acid
  VARIANT 33: note = Any amino acid
  VARIANT 34: note = Any amino acid
  VARIANT 35: note = Any amino acid
  VARIANT 36: note = Any amino acid
  VARIANT 37: note = Any amino acid
  VARIANT 38: note = Any amino acid
  VARIANT 39: note = Any amino acid
  VARIANT 40: note = Any amino acid
  VARIANT 41: note = Any amino acid
  VARIANT 42: note = Any amino acid
  VARIANT 43: note = Any amino acid
  VARIANT 44: note = Any amino acid
  VARIANT 45: note = Any amino acid
  VARIANT 46: note = Any amino acid
  VARIANT 47: note = Any amino acid
  VARIANT 49: note = Any amino acid
  VARIANT 50: note = Any amino acid
  VARIANT 51: note = Any amino acid
  VARIANT 52: note = Any amino acid
  VARIANT 53: note = Any amino acid
  VARIANT 54: note = Any amino acid
  VARIANT 55: note = Any amino acid
  VARIANT 56: note = Any amino acid
  VARIANT 57: note = Any amino acid
  VARIANT 58: note = Any amino acid
  VARIANT 59: note = Any amino acid
  VARIANT 60: note = Any amino acid
  VARIANT 61: note = Any amino acid
  VARIANT 62: note = Any amino acid
  VARIANT 63: note = Any amino acid
  VARIANT 64: note = Any amino acid
  VARIANT 65: note = Any amino acid
  VARIANT 66: note = Any amino acid
  VARIANT 67: note = Any amino acid
  VARIANT 68: note = Any amino acid
  VARIANT 69: note = Any amino acid
  VARIANT 70: note = Any amino acid
  VARIANT 71: note = Any amino acid
  VARIANT 72: note = Any amino acid
  VARIANT 73: note = Any amino acid
  VARIANT 74: note = Any amino acid
  VARIANT 75: note = Any amino acid
  VARIANT 76: note = Any amino acid
  VARIANT 77: note = Any amino acid
  VARIANT 78: note = Any amino acid
  VARIANT 79: note = Any amino acid
  VARIANT 80: note = Any amino acid
  VARIANT 81: note = Any amino acid
  VARIANT 82: note = Any amino acid
  VARIANT 83: note = Any amino acid
  VARIANT 84: note = Any amino acid
  VARIANT 85: note = Any amino acid
  VARIANT 86: note = Any amino acid
  VARIANT 87: note = Any amino acid
  VARIANT 89: note = Any amino acid
  VARIANT 91: note = Any amino acid
  VARIANT 92: note = Any amino acid
DXXXXXXXXXXXXXXXXXXXXXXXXXXXXXXXXXXXXXXXXXXXXXXDXXXXXXXXXXXXXXXXXXXXXXXXXXXXXXXXXXXXXXXKXDXXD

SEQ ID NO: 795777 - protein, 95 aa, unidentified
  VARIANT 2: note = Any amino acid
  VARIANT 3: note = Any amino acid
  VARIANT 4: note = Any amino acid
  VARIANT 5: note = Any amino acid
  VARIANT 6: note = Any amino acid
  VARIANT 7: note = Any amino acid
  VARIANT 8: note = Any amino acid
  VARIANT 9: note = Any amino acid
  VARIANT 10: note = Any amino acid
  VARIANT 11: note = Any amino acid
  VARIANT 12: note = Any amino acid
  VARIANT 13: note = Any amino acid
  VARIANT 14: note = Any amino acid
  VARIANT 15: note = Any amino acid
  VARIANT 16: note = Any amino acid
  VARIANT 17: note = Any amino acid
  VARIANT 18: note = Any amino acid
  VARIANT 19: note = Any amino acid
  VARIANT 20: note = Any amino acid
  VARIANT 21: note = Any amino acid
  VARIANT 22: note = Any amino acid
  VARIANT 23: note = Any amino acid
  VARIANT 24: note = Any amino acid
  VARIANT 25: note = Any amino acid
  VARIANT 26: note = Any amino acid
  VARIANT 27: note = Any amino acid
  VARIANT 28: note = Any amino acid
  VARIANT 29: note = Any amino acid
  VARIANT 30: note = Any amino acid
  VARIANT 31: note = Any amino acid
  VARIANT 32: note = Any amino acid
  VARIANT 33: note = Any amino acid
  VARIANT 34: note = Any amino acid
  VARIANT 35: note = Any amino acid
  VARIANT 36: note = Any amino acid
  VARIANT 37: note = Any amino acid
  VARIANT 38: note = Any amino acid
  VARIANT 39: note = Any amino acid
  VARIANT 40: note = Any amino acid
  VARIANT 41: note = Any amino acid
  VARIANT 42: note = Any amino acid
  VARIANT 43: note = Any amino acid
  VARIANT 44: note = Any amino acid
  VARIANT 45: note = Any amino acid
  VARIANT 46: note = Any amino acid
  VARIANT 47: note = Any amino acid
  VARIANT 48: note = Any amino acid
  VARIANT 50: note = Any amino acid
  VARIANT 51: note = Any amino acid
  VARIANT 52: note = Any amino acid
  VARIANT 53: note = Any amino acid
  VARIANT 54: note = Any amino acid
  VARIANT 55: note = Any amino acid
  VARIANT 56: note = Any amino acid
  VARIANT 57: note = Any amino acid
  VARIANT 58: note = Any amino acid
  VARIANT 59: note = Any amino acid
  VARIANT 60: note = Any amino acid
  VARIANT 61: note = Any amino acid
  VARIANT 62: note = Any amino acid
  VARIANT 63: note = Any amino acid
  VARIANT 64: note = Any amino acid
  VARIANT 65: note = Any amino acid
  VARIANT 66: note = Any amino acid
  VARIANT 67: note = Any amino acid
  VARIANT 68: note = Any amino acid
  VARIANT 69: note = Any amino acid
  VARIANT 70: note = Any amino acid
  VARIANT 71: note = Any amino acid
  VARIANT 72: note = Any amino acid
  VARIANT 73: note = Any amino acid
  VARIANT 74: note = Any amino acid
  VARIANT 75: note = Any amino acid
  VARIANT 76: note = Any amino acid
  VARIANT 77: note = Any amino acid
  VARIANT 78: note = Any amino acid
  VARIANT 79: note = Any amino acid
  VARIANT 80: note = Any amino acid
  VARIANT 81: note = Any amino acid
  VARIANT 82: note = Any amino acid
  VARIANT 83: note = Any amino acid
  VARIANT 84: note = Any amino acid
  VARIANT 85: note = Any amino acid
  VARIANT 86: note = Any amino acid
  VARIANT 87: note = Any amino acid
  VARIANT 88: note = Any amino acid
  VARIANT 89: note = Any amino acid
  VARIANT 91: note = Any amino acid
  VARIANT 93: note = Any amino acid
  VARIANT 94: note = Any amino acid
DXXXXXXXXXXXXXXXXXXXXXXXXXXXXXXXXXXXXXXXXXXXXXXXGXXXXXXXXXXXXXXXXXXXXXXXXXXXXXXXXXXXXXXXXKXDXXD

SEQ ID NO: 795778 - protein, 96 aa, unidentified
  VARIANT 2: note = Any amino acid
  VARIANT 3: note = Any amino acid
  VARIANT 4: note = Any amino acid
  VARIANT 5: note = Any amino acid
  VARIANT 6: note = Any amino acid
  VARIANT 7: note = Any amino acid
  VARIANT 8: note = Any amino acid
  VARIANT 9: note = Any amino acid
  VARIANT 10: note = Any amino acid
  VARIANT 11: note = Any amino acid
  VARIANT 12: note = Any amino acid
  VARIANT 13: note = Any amino acid
  VARIANT 14: note = Any amino acid
  VARIANT 15: note = Any amino acid
  VARIANT 16: note = Any amino acid
  VARIANT 17: note = Any amino acid
  VARIANT 18: note = Any amino acid
  VARIANT 19: note = Any amino acid
  VARIANT 20: note = Any amino acid
  VARIANT 21: note = Any amino acid
  VARIANT 22: note = Any amino acid
  VARIANT 23: note = Any amino acid
  VARIANT 24: note = Any amino acid
  VARIANT 25: note = Any amino acid
  VARIANT 26: note = Any amino acid
  VARIANT 27: note = Any amino acid
  VARIANT 28: note = Any amino acid
  VARIANT 29: note = Any amino acid
  VARIANT 30: note = Any amino acid
  VARIANT 31: note = Any amino acid
  VARIANT 32: note = Any amino acid
  VARIANT 33: note = Any amino acid
  VARIANT 34: note = Any amino acid
  VARIANT 35: note = Any amino acid
  VARIANT 36: note = Any amino acid
  VARIANT 37: note = Any amino acid
  VARIANT 38: note = Any amino acid
  VARIANT 39: note = Any amino acid
  VARIANT 40: note = Any amino acid
  VARIANT 41: note = Any amino acid
  VARIANT 42: note = Any amino acid
  VARIANT 43: note = Any amino acid
  VARIANT 44: note = Any amino acid
  VARIANT 45: note = Any amino acid
  VARIANT 46: note = Any amino acid
  VARIANT 47: note = Any amino acid
  VARIANT 48: note = Any amino acid
  VARIANT 49: note = Any amino acid
  VARIANT 51: note = Any amino acid
  VARIANT 52: note = Any amino acid
  VARIANT 53: note = Any amino acid
  VARIANT 54: note = Any amino acid
  VARIANT 55: note = Any amino acid
  VARIANT 56: note = Any amino acid
  VARIANT 57: note = Any amino acid
  VARIANT 58: note = Any amino acid
  VARIANT 59: note = Any amino acid
  VARIANT 60: note = Any amino acid
  VARIANT 61: note = Any amino acid
  VARIANT 62: note = Any amino acid
  VARIANT 63: note = Any amino acid
  VARIANT 64: note = Any amino acid
  VARIANT 65: note = Any amino acid
  VARIANT 66: note = Any amino acid
  VARIANT 67: note = Any amino acid
  VARIANT 68: note = Any amino acid
  VARIANT 69: note = Any amino acid
  VARIANT 70: note = Any amino acid
  VARIANT 71: note = Any amino acid
  VARIANT 72: note = Any amino acid
  VARIANT 73: note = Any amino acid
  VARIANT 74: note = Any amino acid
  VARIANT 75: note = Any amino acid
  VARIANT 76: note = Any amino acid
  VARIANT 77: note = Any amino acid
  VARIANT 78: note = Any amino acid
  VARIANT 79: note = Any amino acid
  VARIANT 80: note = Any amino acid
  VARIANT 81: note = Any amino acid
  VARIANT 82: note = Any amino acid
  VARIANT 83: note = Any amino acid
  VARIANT 84: note = Any amino acid
  VARIANT 85: note = Any amino acid
  VARIANT 86: note = Any amino acid
  VARIANT 87: note = Any amino acid
  VARIANT 88: note = Any amino acid
  VARIANT 89: note = Any amino acid
  VARIANT 90: note = Any amino acid
  VARIANT 92: note = Any amino acid
  VARIANT 94: note = Any amino acid
  VARIANT 95: note = Any amino acid
DXXXXXXXXXXXXXXXXXXXXXXXXXXXXXXXXXXXXXXXXXXXXXXXXEXXXXXXXXXXXXXXXXXXXXXXXXXXXXXXXXXXXXXXXXLXDXXA

SEQ ID NO: 795779 - protein, 102 aa, unidentified
  VARIANT 2: note = Any amino acid
  VARIANT 3: note = Any amino acid
  VARIANT 4: note = Any amino acid
  VARIANT 5: note = Any amino acid
  VARIANT 6: note = Any amino acid
  VARIANT 7: note = Any amino acid
  VARIANT 8: note = Any amino acid
  VARIANT 9: note = Any amino acid
  VARIANT 10: note = Any amino acid
  VARIANT 11: note = Any amino acid
  VARIANT 12: note = Any amino acid
  VARIANT 13: note = Any amino acid
  VARIANT 14: note = Any amino acid
  VARIANT 15: note = Any amino acid
  VARIANT 16: note = Any amino acid
  VARIANT 17: note = Any amino acid
  VARIANT 18: note = Any amino acid
  VARIANT 19: note = Any amino acid
  VARIANT 20: note = Any amino acid
  VARIANT 21: note = Any amino acid
  VARIANT 22: note = Any amino acid
  VARIANT 23: note = Any amino acid
  VARIANT 24: note = Any amino acid
  VARIANT 25: note = Any amino acid
  VARIANT 26: note = Any amino acid
  VARIANT 27: note = Any amino acid
  VARIANT 28: note = Any amino acid
  VARIANT 29: note = Any amino acid
  VARIANT 30: note = Any amino acid
  VARIANT 31: note = Any amino acid
  VARIANT 32: note = Any amino acid
  VARIANT 33: note = Any amino acid
  VARIANT 34: note = Any amino acid
  VARIANT 35: note = Any amino acid
  VARIANT 36: note = Any amino acid
  VARIANT 37: note = Any amino acid
  VARIANT 38: note = Any amino acid
  VARIANT 39: note = Any amino acid
  VARIANT 40: note = Any amino acid
  VARIANT 41: note = Any amino acid
  VARIANT 42: note = Any amino acid
  VARIANT 43: note = Any amino acid
  VARIANT 44: note = Any amino acid
  VARIANT 45: note = Any amino acid
  VARIANT 46: note = Any amino acid
  VARIANT 47: note = Any amino acid
  VARIANT 48: note = Any amino acid
  VARIANT 49: note = Any amino acid
  VARIANT 50: note = Any amino acid
  VARIANT 51: note = Any amino acid
  VARIANT 52: note = Any amino acid
  VARIANT 53: note = Any amino acid
  VARIANT 54: note = Any amino acid
  VARIANT 55: note = Any amino acid
  VARIANT 57: note = Any amino acid
  VARIANT 58: note = Any amino acid
  VARIANT 59: note = Any amino acid
  VARIANT 60: note = Any amino acid
  VARIANT 61: note = Any amino acid
  VARIANT 62: note = Any amino acid
  VARIANT 63: note = Any amino acid
  VARIANT 64: note = Any amino acid
  VARIANT 65: note = Any amino acid
  VARIANT 66: note = Any amino acid
  VARIANT 67: note = Any amino acid
  VARIANT 68: note = Any amino acid
  VARIANT 69: note = Any amino acid
  VARIANT 70: note = Any amino acid
  VARIANT 71: note = Any amino acid
  VARIANT 72: note = Any amino acid
  VARIANT 73: note = Any amino acid
  VARIANT 74: note = Any amino acid
  VARIANT 75: note = Any amino acid
  VARIANT 76: note = Any amino acid
  VARIANT 77: note = Any amino acid
  VARIANT 78: note = Any amino acid
  VARIANT 79: note = Any amino acid
  VARIANT 80: note = Any amino acid
  VARIANT 81: note = Any amino acid
  VARIANT 82: note = Any amino acid
  VARIANT 83: note = Any amino acid
  VARIANT 84: note = Any amino acid
  VARIANT 85: note = Any amino acid
  VARIANT 86: note = Any amino acid
  VARIANT 87: note = Any amino acid
  VARIANT 88: note = Any amino acid
  VARIANT 89: note = Any amino acid
  VARIANT 90: note = Any amino acid
  VARIANT 91: note = Any amino acid
  VARIANT 92: note = Any amino acid
  VARIANT 93: note = Any amino acid
  VARIANT 94: note = Any amino acid
  VARIANT 95: note = Any amino acid
  VARIANT 96: note = Any amino acid
  VARIANT 98: note = Any amino acid
  VARIANT 100: note = Any amino acid
  VARIANT 101: note = Any amino acid
DXXXXXXXXXXXXXXXXXXXXXXXXXXXXXXXXXXXXXXXXXXXXXXXXXXXXXXEXXXXXXXXXXXXXXXXXXXXXXXXXXXXXXXXXXXXXXXXRXEXXD

SEQ ID NO: 795780 - protein, 98 aa, unidentified
  VARIANT 2: note = Any amino acid
  VARIANT 3: note = Any amino acid
  VARIANT 4: note = Any amino acid
  VARIANT 5: note = Any amino acid
  VARIANT 6: note = Any amino acid
  VARIANT 7: note = Any amino acid
  VARIANT 8: note = Any amino acid
  VARIANT 9: note = Any amino acid
  VARIANT 10: note = Any amino acid
  VARIANT 11: note = Any amino acid
  VARIANT 12: note = Any amino acid
  VARIANT 13: note = Any amino acid
  VARIANT 14: note = Any amino acid
  VARIANT 15: note = Any amino acid
  VARIANT 16: note = Any amino acid
  VARIANT 17: note = Any amino acid
  VARIANT 18: note = Any amino acid
  VARIANT 19: note = Any amino acid
  VARIANT 20: note = Any amino acid
  VARIANT 21: note = Any amino acid
  VARIANT 22: note = Any amino acid
  VARIANT 23: note = Any amino acid
  VARIANT 24: note = Any amino acid
  VARIANT 25: note = Any amino acid
  VARIANT 26: note = Any amino acid
  VARIANT 27: note = Any amino acid
  VARIANT 28: note = Any amino acid
  VARIANT 29: note = Any amino acid
  VARIANT 30: note = Any amino acid
  VARIANT 31: note = Any amino acid
  VARIANT 32: note = Any amino acid
  VARIANT 33: note = Any amino acid
  VARIANT 34: note = Any amino acid
  VARIANT 35: note = Any amino acid
  VARIANT 36: note = Any amino acid
  VARIANT 37: note = Any amino acid
  VARIANT 38: note = Any amino acid
  VARIANT 39: note = Any amino acid
  VARIANT 40: note = Any amino acid
  VARIANT 41: note = Any amino acid
  VARIANT 42: note = Any amino acid
  VARIANT 43: note = Any amino acid
  VARIANT 44: note = Any amino acid
  VARIANT 45: note = Any amino acid
  VARIANT 46: note = Any amino acid
  VARIANT 47: note = Any amino acid
  VARIANT 48: note = Any amino acid
  VARIANT 49: note = Any amino acid
  VARIANT 50: note = Any amino acid
  VARIANT 51: note = Any amino acid
  VARIANT 52: note = Any amino acid
  VARIANT 53: note = Any amino acid
  VARIANT 54: note = Any amino acid
  VARIANT 55: note = Any amino acid
  VARIANT 56: note = Any amino acid
  VARIANT 57: note = Any amino acid
  VARIANT 58: note = Any amino acid
  VARIANT 59: note = Any amino acid
  VARIANT 60: note = Any amino acid
  VARIANT 61: note = Any amino acid
  VARIANT 63: note = Any amino acid
  VARIANT 64: note = Any amino acid
  VARIANT 65: note = Any amino acid
  VARIANT 66: note = Any amino acid
  VARIANT 67: note = Any amino acid
  VARIANT 68: note = Any amino acid
  VARIANT 69: note = Any amino acid
  VARIANT 70: note = Any amino acid
  VARIANT 71: note = Any amino acid
  VARIANT 72: note = Any amino acid
  VARIANT 73: note = Any amino acid
  VARIANT 74: note = Any amino acid
  VARIANT 75: note = Any amino acid
  VARIANT 76: note = Any amino acid
  VARIANT 77: note = Any amino acid
  VARIANT 78: note = Any amino acid
  VARIANT 79: note = Any amino acid
  VARIANT 80: note = Any amino acid
  VARIANT 81: note = Any amino acid
  VARIANT 82: note = Any amino acid
  VARIANT 83: note = Any amino acid
  VARIANT 84: note = Any amino acid
  VARIANT 85: note = Any amino acid
  VARIANT 86: note = Any amino acid
  VARIANT 87: note = Any amino acid
  VARIANT 88: note = Any amino acid
  VARIANT 89: note = Any amino acid
  VARIANT 90: note = Any amino acid
  VARIANT 91: note = Any amino acid
  VARIANT 92: note = Any amino acid
  VARIANT 94: note = Any amino acid
  VARIANT 96: note = Any amino acid
  VARIANT 97: note = Any amino acid
DXXXXXXXXXXXXXXXXXXXXXXXXXXXXXXXXXXXXXXXXXXXXXXXXXXXXXXXXXXXXEXXXXXXXXXXXXXXXXXXXXXXXXXXXXXXKXDXXD

SEQ ID NO: 795781 - protein, 94 aa, unidentified
  VARIANT 2: note = Any amino acid
  VARIANT 3: note = Any amino acid
  VARIANT 4: note = Any amino acid
  VARIANT 5: note = Any amino acid
  VARIANT 6: note = Any amino acid
  VARIANT 7: note = Any amino acid
  VARIANT 8: note = Any amino acid
  VARIANT 9: note = Any amino acid
  VARIANT 10: note = Any amino acid
  VARIANT 11: note = Any amino acid
  VARIANT 12: note = Any amino acid
  VARIANT 13: note = Any amino acid
  VARIANT 14: note = Any amino acid
  VARIANT 15: note = Any amino acid
  VARIANT 16: note = Any amino acid
  VARIANT 17: note = Any amino acid
  VARIANT 18: note = Any amino acid
  VARIANT 19: note = Any amino acid
  VARIANT 20: note = Any amino acid
  VARIANT 21: note = Any amino acid
  VARIANT 22: note = Any amino acid
  VARIANT 23: note = Any amino acid
  VARIANT 24: note = Any amino acid
  VARIANT 25: note = Any amino acid
  VARIANT 26: note = Any amino acid
  VARIANT 27: note = Any amino acid
  VARIANT 28: note = Any amino acid
  VARIANT 29: note = Any amino acid
  VARIANT 30: note = Any amino acid
  VARIANT 31: note = Any amino acid
  VARIANT 32: note = Any amino acid
  VARIANT 33: note = Any amino acid
  VARIANT 34: note = Any amino acid
  VARIANT 35: note = Any amino acid
  VARIANT 36: note = Any amino acid
  VARIANT 37: note = Any amino acid
  VARIANT 38: note = Any amino acid
  VARIANT 39: note = Any amino acid
  VARIANT 40: note = Any amino acid
  VARIANT 41: note = Any amino acid
  VARIANT 42: note = Any amino acid
  VARIANT 43: note = Any amino acid
  VARIANT 44: note = Any amino acid
  VARIANT 45: note = Any amino acid
  VARIANT 46: note = Any amino acid
  VARIANT 47: note = Any amino acid
  VARIANT 48: note = Any amino acid
  VARIANT 50: note = Any amino acid
  VARIANT 51: note = Any amino acid
  VARIANT 52: note = Any amino acid
  VARIANT 53: note = Any amino acid
  VARIANT 54: note = Any amino acid
  VARIANT 55: note = Any amino acid
  VARIANT 56: note = Any amino acid
  VARIANT 57: note = Any amino acid
  VARIANT 58: note = Any amino acid
  VARIANT 59: note = Any amino acid
  VARIANT 60: note = Any amino acid
  VARIANT 61: note = Any amino acid
  VARIANT 62: note = Any amino acid
  VARIANT 63: note = Any amino acid
  VARIANT 64: note = Any amino acid
  VARIANT 65: note = Any amino acid
  VARIANT 66: note = Any amino acid
  VARIANT 67: note = Any amino acid
  VARIANT 68: note = Any amino acid
  VARIANT 69: note = Any amino acid
  VARIANT 70: note = Any amino acid
  VARIANT 71: note = Any amino acid
  VARIANT 72: note = Any amino acid
  VARIANT 73: note = Any amino acid
  VARIANT 74: note = Any amino acid
  VARIANT 75: note = Any amino acid
  VARIANT 76: note = Any amino acid
  VARIANT 77: note = Any amino acid
  VARIANT 78: note = Any amino acid
  VARIANT 79: note = Any amino acid
  VARIANT 80: note = Any amino acid
  VARIANT 81: note = Any amino acid
  VARIANT 82: note = Any amino acid
  VARIANT 83: note = Any amino acid
  VARIANT 84: note = Any amino acid
  VARIANT 85: note = Any amino acid
  VARIANT 86: note = Any amino acid
  VARIANT 87: note = Any amino acid
  VARIANT 88: note = Any amino acid
  VARIANT 90: note = Any amino acid
  VARIANT 92: note = Any amino acid
  VARIANT 93: note = Any amino acid
EXXXXXXXXXXXXXXXXXXXXXXXXXXXXXXXXXXXXXXXXXXXXXXXEXXXXXXXXXXXXXXXXXXXXXXXXXXXXXXXXXXXXXXXKXDXXD

SEQ ID NO: 795782 - protein, 94 aa, unidentified
  VARIANT 2: note = Any amino acid
  VARIANT 3: note = Any amino acid
  VARIANT 4: note = Any amino acid
  VARIANT 5: note = Any amino acid
  VARIANT 6: note = Any amino acid
  VARIANT 7: note = Any amino acid
  VARIANT 8: note = Any amino acid
  VARIANT 9: note = Any amino acid
  VARIANT 10: note = Any amino acid
  VARIANT 11: note = Any amino acid
  VARIANT 12: note = Any amino acid
  VARIANT 13: note = Any amino acid
  VARIANT 14: note = Any amino acid
  VARIANT 15: note = Any amino acid
  VARIANT 16: note = Any amino acid
  VARIANT 17: note = Any amino acid
  VARIANT 18: note = Any amino acid
  VARIANT 19: note = Any amino acid
  VARIANT 20: note = Any amino acid
  VARIANT 21: note = Any amino acid
  VARIANT 22: note = Any amino acid
  VARIANT 23: note = Any amino acid
  VARIANT 24: note = Any amino acid
  VARIANT 25: note = Any amino acid
  VARIANT 26: note = Any amino acid
  VARIANT 27: note = Any amino acid
  VARIANT 28: note = Any amino acid
  VARIANT 29: note = Any amino acid
  VARIANT 30: note = Any amino acid
  VARIANT 31: note = Any amino acid
  VARIANT 32: note = Any amino acid
  VARIANT 33: note = Any amino acid
  VARIANT 34: note = Any amino acid
  VARIANT 35: note = Any amino acid
  VARIANT 36: note = Any amino acid
  VARIANT 37: note = Any amino acid
  VARIANT 38: note = Any amino acid
  VARIANT 39: note = Any amino acid
  VARIANT 40: note = Any amino acid
  VARIANT 41: note = Any amino acid
  VARIANT 42: note = Any amino acid
  VARIANT 43: note = Any amino acid
  VARIANT 44: note = Any amino acid
  VARIANT 45: note = Any amino acid
  VARIANT 46: note = Any amino acid
  VARIANT 47: note = Any amino acid
  VARIANT 49: note = Any amino acid
  VARIANT 50: note = Any amino acid
  VARIANT 51: note = Any amino acid
  VARIANT 52: note = Any amino acid
  VARIANT 53: note = Any amino acid
  VARIANT 54: note = Any amino acid
  VARIANT 55: note = Any amino acid
  VARIANT 56: note = Any amino acid
  VARIANT 57: note = Any amino acid
  VARIANT 58: note = Any amino acid
  VARIANT 59: note = Any amino acid
  VARIANT 60: note = Any amino acid
  VARIANT 61: note = Any amino acid
  VARIANT 62: note = Any amino acid
  VARIANT 63: note = Any amino acid
  VARIANT 64: note = Any amino acid
  VARIANT 65: note = Any amino acid
  VARIANT 66: note = Any amino acid
  VARIANT 67: note = Any amino acid
  VARIANT 68: note = Any amino acid
  VARIANT 69: note = Any amino acid
  VARIANT 70: note = Any amino acid
  VARIANT 71: note = Any amino acid
  VARIANT 72: note = Any amino acid
  VARIANT 73: note = Any amino acid
  VARIANT 74: note = Any amino acid
  VARIANT 75: note = Any amino acid
  VARIANT 76: note = Any amino acid
  VARIANT 77: note = Any amino acid
  VARIANT 78: note = Any amino acid
  VARIANT 79: note = Any amino acid
  VARIANT 80: note = Any amino acid
  VARIANT 81: note = Any amino acid
  VARIANT 82: note = Any amino acid
  VARIANT 83: note = Any amino acid
  VARIANT 84: note = Any amino acid
  VARIANT 85: note = Any amino acid
  VARIANT 86: note = Any amino acid
  VARIANT 87: note = Any amino acid
  VARIANT 88: note = Any amino acid
  VARIANT 90: note = Any amino acid
  VARIANT 92: note = Any amino acid
  VARIANT 93: note = Any amino acid
DXXXXXXXXXXXXXXXXXXXXXXXXXXXXXXXXXXXXXXXXXXXXXXCXXXXXXXXXXXXXXXXXXXXXXXXXXXXXXXXXXXXXXXXKXDXXD

SEQ ID NO: 795783 - protein, 113 aa, unidentified
  VARIANT 2: note = Any amino acid
  VARIANT 3: note = Any amino acid
  VARIANT 4: note = Any amino acid
  VARIANT 5: note = Any amino acid
  VARIANT 6: note = Any amino acid
  VARIANT 7: note = Any amino acid
  VARIANT 8: note = Any amino acid
  VARIANT 9: note = Any amino acid
  VARIANT 10: note = Any amino acid
  VARIANT 11: note = Any amino acid
  VARIANT 12: note = Any amino acid
  VARIANT 13: note = Any amino acid
  VARIANT 14: note = Any amino acid
  VARIANT 15: note = Any amino acid
  VARIANT 16: note = Any amino acid
  VARIANT 17: note = Any amino acid
  VARIANT 18: note = Any amino acid
  VARIANT 19: note = Any amino acid
  VARIANT 20: note = Any amino acid
  VARIANT 21: note = Any amino acid
  VARIANT 22: note = Any amino acid
  VARIANT 23: note = Any amino acid
  VARIANT 24: note = Any amino acid
  VARIANT 25: note = Any amino acid
  VARIANT 26: note = Any amino acid
  VARIANT 27: note = Any amino acid
  VARIANT 28: note = Any amino acid
  VARIANT 29: note = Any amino acid
  VARIANT 30: note = Any amino acid
  VARIANT 31: note = Any amino acid
  VARIANT 32: note = Any amino acid
  VARIANT 33: note = Any amino acid
  VARIANT 34: note = Any amino acid
  VARIANT 35: note = Any amino acid
  VARIANT 36: note = Any amino acid
  VARIANT 37: note = Any amino acid
  VARIANT 38: note = Any amino acid
  VARIANT 39: note = Any amino acid
  VARIANT 40: note = Any amino acid
  VARIANT 41: note = Any amino acid
  VARIANT 42: note = Any amino acid
  VARIANT 43: note = Any amino acid
  VARIANT 44: note = Any amino acid
  VARIANT 45: note = Any amino acid
  VARIANT 46: note = Any amino acid
  VARIANT 47: note = Any amino acid
  VARIANT 48: note = Any amino acid
  VARIANT 49: note = Any amino acid
  VARIANT 50: note = Any amino acid
  VARIANT 51: note = Any amino acid
  VARIANT 52: note = Any amino acid
  VARIANT 53: note = Any amino acid
  VARIANT 54: note = Any amino acid
  VARIANT 55: note = Any amino acid
  VARIANT 57: note = Any amino acid
  VARIANT 58: note = Any amino acid
  VARIANT 59: note = Any amino acid
  VARIANT 60: note = Any amino acid
  VARIANT 61: note = Any amino acid
  VARIANT 62: note = Any amino acid
  VARIANT 63: note = Any amino acid
  VARIANT 64: note = Any amino acid
  VARIANT 65: note = Any amino acid
  VARIANT 66: note = Any amino acid
  VARIANT 67: note = Any amino acid
  VARIANT 68: note = Any amino acid
  VARIANT 69: note = Any amino acid
  VARIANT 70: note = Any amino acid
  VARIANT 71: note = Any amino acid
  VARIANT 72: note = Any amino acid
  VARIANT 73: note = Any amino acid
  VARIANT 74: note = Any amino acid
  VARIANT 75: note = Any amino acid
  VARIANT 76: note = Any amino acid
  VARIANT 77: note = Any amino acid
  VARIANT 78: note = Any amino acid
  VARIANT 79: note = Any amino acid
  VARIANT 80: note = Any amino acid
  VARIANT 81: note = Any amino acid
  VARIANT 82: note = Any amino acid
  VARIANT 83: note = Any amino acid
  VARIANT 84: note = Any amino acid
  VARIANT 85: note = Any amino acid
  VARIANT 86: note = Any amino acid
  VARIANT 87: note = Any amino acid
  VARIANT 88: note = Any amino acid
  VARIANT 89: note = Any amino acid
  VARIANT 90: note = Any amino acid
  VARIANT 91: note = Any amino acid
  VARIANT 92: note = Any amino acid
  VARIANT 93: note = Any amino acid
  VARIANT 94: note = Any amino acid
  VARIANT 95: note = Any amino acid
  VARIANT 96: note = Any amino acid
  VARIANT 97: note = Any amino acid
  VARIANT 98: note = Any amino acid
  VARIANT 99: note = Any amino acid
  VARIANT 100: note = Any amino acid
  VARIANT 101: note = Any amino acid
  VARIANT 102: note = Any amino acid
  VARIANT 103: note = Any amino acid
  VARIANT 104: note = Any amino acid
  VARIANT 105: note = Any amino acid
  VARIANT 106: note = Any amino acid
  VARIANT 107: note = Any amino acid
  VARIANT 109: note = Any amino acid
  VARIANT 111: note = Any amino acid
  VARIANT 112: note = Any amino acid
DXXXXXXXXXXXXXXXXXXXXXXXXXXXXXXXXXXXXXXXXXXXXXXXXXXXXXXEXXXXXXXXXXXXXXXXXXXXXXXXXXXXXXXXXXXXXXXXXXXXXXXXXXXKXDXXD

SEQ ID NO: 795784 - protein, 98 aa, unidentified
  VARIANT 2: note = Any amino acid
  VARIANT 3: note = Any amino acid
  VARIANT 4: note = Any amino acid
  VARIANT 5: note = Any amino acid
  VARIANT 6: note = Any amino acid
  VARIANT 7: note = Any amino acid
  VARIANT 8: note = Any amino acid
  VARIANT 9: note = Any amino acid
  VARIANT 10: note = Any amino acid
  VARIANT 11: note = Any amino acid
  VARIANT 12: note = Any amino acid
  VARIANT 13: note = Any amino acid
  VARIANT 14: note = Any amino acid
  VARIANT 15: note = Any amino acid
  VARIANT 16: note = Any amino acid
  VARIANT 17: note = Any amino acid
  VARIANT 18: note = Any amino acid
  VARIANT 19: note = Any amino acid
  VARIANT 20: note = Any amino acid
  VARIANT 21: note = Any amino acid
  VARIANT 22: note = Any amino acid
  VARIANT 23: note = Any amino acid
  VARIANT 24: note = Any amino acid
  VARIANT 25: note = Any amino acid
  VARIANT 26: note = Any amino acid
  VARIANT 27: note = Any amino acid
  VARIANT 28: note = Any amino acid
  VARIANT 29: note = Any amino acid
  VARIANT 30: note = Any amino acid
  VARIANT 31: note = Any amino acid
  VARIANT 32: note = Any amino acid
  VARIANT 33: note = Any amino acid
  VARIANT 34: note = Any amino acid
  VARIANT 35: note = Any amino acid
  VARIANT 36: note = Any amino acid
  VARIANT 37: note = Any amino acid
  VARIANT 38: note = Any amino acid
  VARIANT 39: note = Any amino acid
  VARIANT 40: note = Any amino acid
  VARIANT 41: note = Any amino acid
  VARIANT 42: note = Any amino acid
  VARIANT 43: note = Any amino acid
  VARIANT 44: note = Any amino acid
  VARIANT 45: note = Any amino acid
  VARIANT 46: note = Any amino acid
  VARIANT 47: note = Any amino acid
  VARIANT 48: note = Any amino acid
  VARIANT 49: note = Any amino acid
  VARIANT 50: note = Any amino acid
  VARIANT 51: note = Any amino acid
  VARIANT 53: note = Any amino acid
  VARIANT 54: note = Any amino acid
  VARIANT 55: note = Any amino acid
  VARIANT 56: note = Any amino acid
  VARIANT 57: note = Any amino acid
  VARIANT 58: note = Any amino acid
  VARIANT 59: note = Any amino acid
  VARIANT 60: note = Any amino acid
  VARIANT 61: note = Any amino acid
  VARIANT 62: note = Any amino acid
  VARIANT 63: note = Any amino acid
  VARIANT 64: note = Any amino acid
  VARIANT 65: note = Any amino acid
  VARIANT 66: note = Any amino acid
  VARIANT 67: note = Any amino acid
  VARIANT 68: note = Any amino acid
  VARIANT 69: note = Any amino acid
  VARIANT 70: note = Any amino acid
  VARIANT 71: note = Any amino acid
  VARIANT 72: note = Any amino acid
  VARIANT 73: note = Any amino acid
  VARIANT 74: note = Any amino acid
  VARIANT 75: note = Any amino acid
  VARIANT 76: note = Any amino acid
  VARIANT 77: note = Any amino acid
  VARIANT 78: note = Any amino acid
  VARIANT 79: note = Any amino acid
  VARIANT 80: note = Any amino acid
  VARIANT 81: note = Any amino acid
  VARIANT 82: note = Any amino acid
  VARIANT 83: note = Any amino acid
  VARIANT 84: note = Any amino acid
  VARIANT 85: note = Any amino acid
  VARIANT 86: note = Any amino acid
  VARIANT 87: note = Any amino acid
  VARIANT 88: note = Any amino acid
  VARIANT 89: note = Any amino acid
  VARIANT 90: note = Any amino acid
  VARIANT 91: note = Any amino acid
  VARIANT 92: note = Any amino acid
  VARIANT 94: note = Any amino acid
  VARIANT 96: note = Any amino acid
  VARIANT 97: note = Any amino acid
DXXXXXXXXXXXXXXXXXXXXXXXXXXXXXXXXXXXXXXXXXXXXXXXXXXEXXXXXXXXXXXXXXXXXXXXXXXXXXXXXXXXXXXXXXXXQXDXXD

SEQ ID NO: 795785 - protein, 100 aa, unidentified
  VARIANT 2: note = Any amino acid
  VARIANT 3: note = Any amino acid
  VARIANT 4: note = Any amino acid
  VARIANT 5: note = Any amino acid
  VARIANT 6: note = Any amino acid
  VARIANT 7: note = Any amino acid
  VARIANT 8: note = Any amino acid
  VARIANT 9: note = Any amino acid
  VARIANT 10: note = Any amino acid
  VARIANT 11: note = Any amino acid
  VARIANT 12: note = Any amino acid
  VARIANT 13: note = Any amino acid
  VARIANT 14: note = Any amino acid
  VARIANT 15: note = Any amino acid
  VARIANT 16: note = Any amino acid
  VARIANT 17: note = Any amino acid
  VARIANT 18: note = Any amino acid
  VARIANT 19: note = Any amino acid
  VARIANT 20: note = Any amino acid
  VARIANT 21: note = Any amino acid
  VARIANT 22: note = Any amino acid
  VARIANT 23: note = Any amino acid
  VARIANT 24: note = Any amino acid
  VARIANT 25: note = Any amino acid
  VARIANT 26: note = Any amino acid
  VARIANT 27: note = Any amino acid
  VARIANT 28: note = Any amino acid
  VARIANT 29: note = Any amino acid
  VARIANT 30: note = Any amino acid
  VARIANT 31: note = Any amino acid
  VARIANT 32: note = Any amino acid
  VARIANT 33: note = Any amino acid
  VARIANT 34: note = Any amino acid
  VARIANT 35: note = Any amino acid
  VARIANT 36: note = Any amino acid
  VARIANT 37: note = Any amino acid
  VARIANT 38: note = Any amino acid
  VARIANT 39: note = Any amino acid
  VARIANT 40: note = Any amino acid
  VARIANT 41: note = Any amino acid
  VARIANT 42: note = Any amino acid
  VARIANT 43: note = Any amino acid
  VARIANT 44: note = Any amino acid
  VARIANT 45: note = Any amino acid
  VARIANT 46: note = Any amino acid
  VARIANT 47: note = Any amino acid
  VARIANT 48: note = Any amino acid
  VARIANT 49: note = Any amino acid
  VARIANT 50: note = Any amino acid
  VARIANT 51: note = Any amino acid
  VARIANT 52: note = Any amino acid
  VARIANT 53: note = Any amino acid
  VARIANT 54: note = Any amino acid
  VARIANT 56: note = Any amino acid
  VARIANT 57: note = Any amino acid
  VARIANT 58: note = Any amino acid
  VARIANT 59: note = Any amino acid
  VARIANT 60: note = Any amino acid
  VARIANT 61: note = Any amino acid
  VARIANT 62: note = Any amino acid
  VARIANT 63: note = Any amino acid
  VARIANT 64: note = Any amino acid
  VARIANT 65: note = Any amino acid
  VARIANT 66: note = Any amino acid
  VARIANT 67: note = Any amino acid
  VARIANT 68: note = Any amino acid
  VARIANT 69: note = Any amino acid
  VARIANT 70: note = Any amino acid
  VARIANT 71: note = Any amino acid
  VARIANT 72: note = Any amino acid
  VARIANT 73: note = Any amino acid
  VARIANT 74: note = Any amino acid
  VARIANT 75: note = Any amino acid
  VARIANT 76: note = Any amino acid
  VARIANT 77: note = Any amino acid
  VARIANT 78: note = Any amino acid
  VARIANT 79: note = Any amino acid
  VARIANT 80: note = Any amino acid
  VARIANT 81: note = Any amino acid
  VARIANT 82: note = Any amino acid
  VARIANT 83: note = Any amino acid
  VARIANT 84: note = Any amino acid
  VARIANT 85: note = Any amino acid
  VARIANT 86: note = Any amino acid
  VARIANT 87: note = Any amino acid
  VARIANT 88: note = Any amino acid
  VARIANT 89: note = Any amino acid
  VARIANT 90: note = Any amino acid
  VARIANT 91: note = Any amino acid
  VARIANT 92: note = Any amino acid
  VARIANT 93: note = Any amino acid
  VARIANT 94: note = Any amino acid
  VARIANT 96: note = Any amino acid
  VARIANT 98: note = Any amino acid
  VARIANT 99: note = Any amino acid
DXXXXXXXXXXXXXXXXXXXXXXXXXXXXXXXXXXXXXXXXXXXXXXXXXXXXXEXXXXXXXXXXXXXXXXXXXXXXXXXXXXXXXXXXXXXXXKXDXXS

SEQ ID NO: 795786 - protein, 97 aa, unidentified
  VARIANT 2: note = Any amino acid
  VARIANT 3: note = Any amino acid
  VARIANT 4: note = Any amino acid
  VARIANT 5: note = Any amino acid
  VARIANT 6: note = Any amino acid
  VARIANT 7: note = Any amino acid
  VARIANT 8: note = Any amino acid
  VARIANT 9: note = Any amino acid
  VARIANT 10: note = Any amino acid
  VARIANT 11: note = Any amino acid
  VARIANT 12: note = Any amino acid
  VARIANT 13: note = Any amino acid
  VARIANT 14: note = Any amino acid
  VARIANT 15: note = Any amino acid
  VARIANT 16: note = Any amino acid
  VARIANT 17: note = Any amino acid
  VARIANT 18: note = Any amino acid
  VARIANT 19: note = Any amino acid
  VARIANT 20: note = Any amino acid
  VARIANT 21: note = Any amino acid
  VARIANT 22: note = Any amino acid
  VARIANT 23: note = Any amino acid
  VARIANT 24: note = Any amino acid
  VARIANT 25: note = Any amino acid
  VARIANT 26: note = Any amino acid
  VARIANT 27: note = Any amino acid
  VARIANT 28: note = Any amino acid
  VARIANT 29: note = Any amino acid
  VARIANT 30: note = Any amino acid
  VARIANT 31: note = Any amino acid
  VARIANT 32: note = Any amino acid
  VARIANT 33: note = Any amino acid
  VARIANT 34: note = Any amino acid
  VARIANT 35: note = Any amino acid
  VARIANT 36: note = Any amino acid
  VARIANT 37: note = Any amino acid
  VARIANT 38: note = Any amino acid
  VARIANT 39: note = Any amino acid
  VARIANT 40: note = Any amino acid
  VARIANT 41: note = Any amino acid
  VARIANT 42: note = Any amino acid
  VARIANT 43: note = Any amino acid
  VARIANT 44: note = Any amino acid
  VARIANT 45: note = Any amino acid
  VARIANT 46: note = Any amino acid
  VARIANT 47: note = Any amino acid
  VARIANT 48: note = Any amino acid
  VARIANT 49: note = Any amino acid
  VARIANT 50: note = Any amino acid
  VARIANT 51: note = Any amino acid
  VARIANT 52: note = Any amino acid
  VARIANT 53: note = Any amino acid
  VARIANT 54: note = Any amino acid
  VARIANT 55: note = Any amino acid
  VARIANT 56: note = Any amino acid
  VARIANT 57: note = Any amino acid
  VARIANT 58: note = Any amino acid
  VARIANT 60: note = Any amino acid
  VARIANT 61: note = Any amino acid
  VARIANT 62: note = Any amino acid
  VARIANT 63: note = Any amino acid
  VARIANT 64: note = Any amino acid
  VARIANT 65: note = Any amino acid
  VARIANT 66: note = Any amino acid
  VARIANT 67: note = Any amino acid
  VARIANT 68: note = Any amino acid
  VARIANT 69: note = Any amino acid
  VARIANT 70: note = Any amino acid
  VARIANT 71: note = Any amino acid
  VARIANT 72: note = Any amino acid
  VARIANT 73: note = Any amino acid
  VARIANT 74: note = Any amino acid
  VARIANT 75: note = Any amino acid
  VARIANT 76: note = Any amino acid
  VARIANT 77: note = Any amino acid
  VARIANT 78: note = Any amino acid
  VARIANT 79: note = Any amino acid
  VARIANT 80: note = Any amino acid
  VARIANT 81: note = Any amino acid
  VARIANT 82: note = Any amino acid
  VARIANT 83: note = Any amino acid
  VARIANT 84: note = Any amino acid
  VARIANT 85: note = Any amino acid
  VARIANT 86: note = Any amino acid
  VARIANT 87: note = Any amino acid
  VARIANT 88: note = Any amino acid
  VARIANT 89: note = Any amino acid
  VARIANT 90: note = Any amino acid
  VARIANT 91: note = Any amino acid
  VARIANT 93: note = Any amino acid
  VARIANT 95: note = Any amino acid
  VARIANT 96: note = Any amino acid
DXXXXXXXXXXXXXXXXXXXXXXXXXXXXXXXXXXXXXXXXXXXXXXXXXXXXXXXXXEXXXXXXXXXXXXXXXXXXXXXXXXXXXXXXXXKXDXXD

SEQ ID NO: 795787 - protein, 105 aa, unidentified
  VARIANT 2: note = Any amino acid
  VARIANT 3: note = Any amino acid
  VARIANT 4: note = Any amino acid
  VARIANT 5: note = Any amino acid
  VARIANT 6: note = Any amino acid
  VARIANT 7: note = Any amino acid
  VARIANT 8: note = Any amino acid
  VARIANT 9: note = Any amino acid
  VARIANT 10: note = Any amino acid
  VARIANT 11: note = Any amino acid
  VARIANT 12: note = Any amino acid
  VARIANT 13: note = Any amino acid
  VARIANT 14: note = Any amino acid
  VARIANT 15: note = Any amino acid
  VARIANT 16: note = Any amino acid
  VARIANT 17: note = Any amino acid
  VARIANT 18: note = Any amino acid
  VARIANT 19: note = Any amino acid
  VARIANT 20: note = Any amino acid
  VARIANT 21: note = Any amino acid
  VARIANT 22: note = Any amino acid
  VARIANT 23: note = Any amino acid
  VARIANT 24: note = Any amino acid
  VARIANT 25: note = Any amino acid
  VARIANT 26: note = Any amino acid
  VARIANT 27: note = Any amino acid
  VARIANT 28: note = Any amino acid
  VARIANT 29: note = Any amino acid
  VARIANT 30: note = Any amino acid
  VARIANT 31: note = Any amino acid
  VARIANT 32: note = Any amino acid
  VARIANT 33: note = Any amino acid
  VARIANT 34: note = Any amino acid
  VARIANT 35: note = Any amino acid
  VARIANT 36: note = Any amino acid
  VARIANT 37: note = Any amino acid
  VARIANT 38: note = Any amino acid
  VARIANT 39: note = Any amino acid
  VARIANT 40: note = Any amino acid
  VARIANT 41: note = Any amino acid
  VARIANT 42: note = Any amino acid
  VARIANT 43: note = Any amino acid
  VARIANT 44: note = Any amino acid
  VARIANT 45: note = Any amino acid
  VARIANT 46: note = Any amino acid
  VARIANT 47: note = Any amino acid
  VARIANT 48: note = Any amino acid
  VARIANT 49: note = Any amino acid
  VARIANT 50: note = Any amino acid
  VARIANT 51: note = Any amino acid
  VARIANT 52: note = Any amino acid
  VARIANT 53: note = Any amino acid
  VARIANT 54: note = Any amino acid
  VARIANT 55: note = Any amino acid
  VARIANT 56: note = Any amino acid
  VARIANT 57: note = Any amino acid
  VARIANT 58: note = Any amino acid
  VARIANT 60: note = Any amino acid
  VARIANT 61: note = Any amino acid
  VARIANT 62: note = Any amino acid
  VARIANT 63: note = Any amino acid
  VARIANT 64: note = Any amino acid
  VARIANT 65: note = Any amino acid
  VARIANT 66: note = Any amino acid
  VARIANT 67: note = Any amino acid
  VARIANT 68: note = Any amino acid
  VARIANT 69: note = Any amino acid
  VARIANT 70: note = Any amino acid
  VARIANT 71: note = Any amino acid
  VARIANT 72: note = Any amino acid
  VARIANT 73: note = Any amino acid
  VARIANT 74: note = Any amino acid
  VARIANT 75: note = Any amino acid
  VARIANT 76: note = Any amino acid
  VARIANT 77: note = Any amino acid
  VARIANT 78: note = Any amino acid
  VARIANT 79: note = Any amino acid
  VARIANT 80: note = Any amino acid
  VARIANT 81: note = Any amino acid
  VARIANT 82: note = Any amino acid
  VARIANT 83: note = Any amino acid
  VARIANT 84: note = Any amino acid
  VARIANT 85: note = Any amino acid
  VARIANT 86: note = Any amino acid
  VARIANT 87: note = Any amino acid
  VARIANT 88: note = Any amino acid
  VARIANT 89: note = Any amino acid
  VARIANT 90: note = Any amino acid
  VARIANT 91: note = Any amino acid
  VARIANT 92: note = Any amino acid
  VARIANT 93: note = Any amino acid
  VARIANT 94: note = Any amino acid
  VARIANT 95: note = Any amino acid
  VARIANT 96: note = Any amino acid
  VARIANT 97: note = Any amino acid
  VARIANT 98: note = Any amino acid
  VARIANT 99: note = Any amino acid
  VARIANT 101: note = Any amino acid
  VARIANT 103: note = Any amino acid
  VARIANT 104: note = Any amino acid
DXXXXXXXXXXXXXXXXXXXXXXXXXXXXXXXXXXXXXXXXXXXXXXXXXXXXXXXXXEXXXXXXXXXXXXXXXXXXXXXXXXXXXXXXXXXXXXXXXXKXDXXD

SEQ ID NO: 795788 - protein, 95 aa, unidentified
  VARIANT 2: note = Any amino acid
  VARIANT 3: note = Any amino acid
  VARIANT 4: note = Any amino acid
  VARIANT 5: note = Any amino acid
  VARIANT 6: note = Any amino acid
  VARIANT 7: note = Any amino acid
  VARIANT 8: note = Any amino acid
  VARIANT 9: note = Any amino acid
  VARIANT 10: note = Any amino acid
  VARIANT 11: note = Any amino acid
  VARIANT 12: note = Any amino acid
  VARIANT 13: note = Any amino acid
  VARIANT 14: note = Any amino acid
  VARIANT 15: note = Any amino acid
  VARIANT 16: note = Any amino acid
  VARIANT 17: note = Any amino acid
  VARIANT 18: note = Any amino acid
  VARIANT 19: note = Any amino acid
  VARIANT 20: note = Any amino acid
  VARIANT 21: note = Any amino acid
  VARIANT 22: note = Any amino acid
  VARIANT 23: note = Any amino acid
  VARIANT 24: note = Any amino acid
  VARIANT 25: note = Any amino acid
  VARIANT 26: note = Any amino acid
  VARIANT 27: note = Any amino acid
  VARIANT 28: note = Any amino acid
  VARIANT 29: note = Any amino acid
  VARIANT 30: note = Any amino acid
  VARIANT 31: note = Any amino acid
  VARIANT 32: note = Any amino acid
  VARIANT 33: note = Any amino acid
  VARIANT 34: note = Any amino acid
  VARIANT 35: note = Any amino acid
  VARIANT 36: note = Any amino acid
  VARIANT 37: note = Any amino acid
  VARIANT 38: note = Any amino acid
  VARIANT 39: note = Any amino acid
  VARIANT 40: note = Any amino acid
  VARIANT 41: note = Any amino acid
  VARIANT 42: note = Any amino acid
  VARIANT 43: note = Any amino acid
  VARIANT 44: note = Any amino acid
  VARIANT 45: note = Any amino acid
  VARIANT 46: note = Any amino acid
  VARIANT 47: note = Any amino acid
  VARIANT 48: note = Any amino acid
  VARIANT 50: note = Any amino acid
  VARIANT 51: note = Any amino acid
  VARIANT 52: note = Any amino acid
  VARIANT 53: note = Any amino acid
  VARIANT 54: note = Any amino acid
  VARIANT 55: note = Any amino acid
  VARIANT 56: note = Any amino acid
  VARIANT 57: note = Any amino acid
  VARIANT 58: note = Any amino acid
  VARIANT 59: note = Any amino acid
  VARIANT 60: note = Any amino acid
  VARIANT 61: note = Any amino acid
  VARIANT 62: note = Any amino acid
  VARIANT 63: note = Any amino acid
  VARIANT 64: note = Any amino acid
  VARIANT 65: note = Any amino acid
  VARIANT 66: note = Any amino acid
  VARIANT 67: note = Any amino acid
  VARIANT 68: note = Any amino acid
  VARIANT 69: note = Any amino acid
  VARIANT 70: note = Any amino acid
  VARIANT 71: note = Any amino acid
  VARIANT 72: note = Any amino acid
  VARIANT 73: note = Any amino acid
  VARIANT 74: note = Any amino acid
  VARIANT 75: note = Any amino acid
  VARIANT 76: note = Any amino acid
  VARIANT 77: note = Any amino acid
  VARIANT 78: note = Any amino acid
  VARIANT 79: note = Any amino acid
  VARIANT 80: note = Any amino acid
  VARIANT 81: note = Any amino acid
  VARIANT 82: note = Any amino acid
  VARIANT 83: note = Any amino acid
  VARIANT 84: note = Any amino acid
  VARIANT 85: note = Any amino acid
  VARIANT 86: note = Any amino acid
  VARIANT 87: note = Any amino acid
  VARIANT 88: note = Any amino acid
  VARIANT 89: note = Any amino acid
  VARIANT 91: note = Any amino acid
  VARIANT 93: note = Any amino acid
  VARIANT 94: note = Any amino acid
DXXXXXXXXXXXXXXXXXXXXXXXXXXXXXXXXXXXXXXXXXXXXXXXEXXXXXXXXXXXXXXXXXXXXXXXXXXXXXXXXXXXXXXXXKXDXXA

SEQ ID NO: 795789 - protein, 96 aa, unidentified
  VARIANT 2: note = Any amino acid
  VARIANT 3: note = Any amino acid
  VARIANT 4: note = Any amino acid
  VARIANT 5: note = Any amino acid
  VARIANT 6: note = Any amino acid
  VARIANT 7: note = Any amino acid
  VARIANT 8: note = Any amino acid
  VARIANT 9: note = Any amino acid
  VARIANT 10: note = Any amino acid
  VARIANT 11: note = Any amino acid
  VARIANT 12: note = Any amino acid
  VARIANT 13: note = Any amino acid
  VARIANT 14: note = Any amino acid
  VARIANT 15: note = Any amino acid
  VARIANT 16: note = Any amino acid
  VARIANT 17: note = Any amino acid
  VARIANT 18: note = Any amino acid
  VARIANT 19: note = Any amino acid
  VARIANT 20: note = Any amino acid
  VARIANT 21: note = Any amino acid
  VARIANT 22: note = Any amino acid
  VARIANT 23: note = Any amino acid
  VARIANT 24: note = Any amino acid
  VARIANT 25: note = Any amino acid
  VARIANT 26: note = Any amino acid
  VARIANT 27: note = Any amino acid
  VARIANT 28: note = Any amino acid
  VARIANT 29: note = Any amino acid
  VARIANT 30: note = Any amino acid
  VARIANT 31: note = Any amino acid
  VARIANT 32: note = Any amino acid
  VARIANT 33: note = Any amino acid
  VARIANT 34: note = Any amino acid
  VARIANT 35: note = Any amino acid
  VARIANT 36: note = Any amino acid
  VARIANT 37: note = Any amino acid
  VARIANT 38: note = Any amino acid
  VARIANT 39: note = Any amino acid
  VARIANT 40: note = Any amino acid
  VARIANT 41: note = Any amino acid
  VARIANT 42: note = Any amino acid
  VARIANT 43: note = Any amino acid
  VARIANT 44: note = Any amino acid
  VARIANT 45: note = Any amino acid
  VARIANT 46: note = Any amino acid
  VARIANT 47: note = Any amino acid
  VARIANT 48: note = Any amino acid
  VARIANT 49: note = Any amino acid
  VARIANT 51: note = Any amino acid
  VARIANT 52: note = Any amino acid
  VARIANT 53: note = Any amino acid
  VARIANT 54: note = Any amino acid
  VARIANT 55: note = Any amino acid
  VARIANT 56: note = Any amino acid
  VARIANT 57: note = Any amino acid
  VARIANT 58: note = Any amino acid
  VARIANT 59: note = Any amino acid
  VARIANT 60: note = Any amino acid
  VARIANT 61: note = Any amino acid
  VARIANT 62: note = Any amino acid
  VARIANT 63: note = Any amino acid
  VARIANT 64: note = Any amino acid
  VARIANT 65: note = Any amino acid
  VARIANT 66: note = Any amino acid
  VARIANT 67: note = Any amino acid
  VARIANT 68: note = Any amino acid
  VARIANT 69: note = Any amino acid
  VARIANT 70: note = Any amino acid
  VARIANT 71: note = Any amino acid
  VARIANT 72: note = Any amino acid
  VARIANT 73: note = Any amino acid
  VARIANT 74: note = Any amino acid
  VARIANT 75: note = Any amino acid
  VARIANT 76: note = Any amino acid
  VARIANT 77: note = Any amino acid
  VARIANT 78: note = Any amino acid
  VARIANT 79: note = Any amino acid
  VARIANT 80: note = Any amino acid
  VARIANT 81: note = Any amino acid
  VARIANT 82: note = Any amino acid
  VARIANT 83: note = Any amino acid
  VARIANT 84: note = Any amino acid
  VARIANT 85: note = Any amino acid
  VARIANT 86: note = Any amino acid
  VARIANT 87: note = Any amino acid
  VARIANT 88: note = Any amino acid
  VARIANT 89: note = Any amino acid
  VARIANT 90: note = Any amino acid
  VARIANT 92: note = Any amino acid
  VARIANT 94: note = Any amino acid
  VARIANT 95: note = Any amino acid
DXXXXXXXXXXXXXXXXXXXXXXXXXXXXXXXXXXXXXXXXXXXXXXXXSXXXXXXXXXXXXXXXXXXXXXXXXXXXXXXXXXXXXXXXXKXDXXD

SEQ ID NO: 795790 - protein, 97 aa, unidentified
  VARIANT 2: note = Any amino acid
  VARIANT 3: note = Any amino acid
  VARIANT 4: note = Any amino acid
  VARIANT 5: note = Any amino acid
  VARIANT 6: note = Any amino acid
  VARIANT 7: note = Any amino acid
  VARIANT 8: note = Any amino acid
  VARIANT 9: note = Any amino acid
  VARIANT 10: note = Any amino acid
  VARIANT 11: note = Any amino acid
  VARIANT 12: note = Any amino acid
  VARIANT 13: note = Any amino acid
  VARIANT 14: note = Any amino acid
  VARIANT 15: note = Any amino acid
  VARIANT 16: note = Any amino acid
  VARIANT 17: note = Any amino acid
  VARIANT 18: note = Any amino acid
  VARIANT 19: note = Any amino acid
  VARIANT 20: note = Any amino acid
  VARIANT 21: note = Any amino acid
  VARIANT 22: note = Any amino acid
  VARIANT 23: note = Any amino acid
  VARIANT 24: note = Any amino acid
  VARIANT 25: note = Any amino acid
  VARIANT 26: note = Any amino acid
  VARIANT 27: note = Any amino acid
  VARIANT 28: note = Any amino acid
  VARIANT 29: note = Any amino acid
  VARIANT 30: note = Any amino acid
  VARIANT 31: note = Any amino acid
  VARIANT 32: note = Any amino acid
  VARIANT 33: note = Any amino acid
  VARIANT 34: note = Any amino acid
  VARIANT 35: note = Any amino acid
  VARIANT 36: note = Any amino acid
  VARIANT 37: note = Any amino acid
  VARIANT 38: note = Any amino acid
  VARIANT 39: note = Any amino acid
  VARIANT 40: note = Any amino acid
  VARIANT 41: note = Any amino acid
  VARIANT 42: note = Any amino acid
  VARIANT 43: note = Any amino acid
  VARIANT 44: note = Any amino acid
  VARIANT 45: note = Any amino acid
  VARIANT 46: note = Any amino acid
  VARIANT 47: note = Any amino acid
  VARIANT 48: note = Any amino acid
  VARIANT 49: note = Any amino acid
  VARIANT 50: note = Any amino acid
  VARIANT 52: note = Any amino acid
  VARIANT 53: note = Any amino acid
  VARIANT 54: note = Any amino acid
  VARIANT 55: note = Any amino acid
  VARIANT 56: note = Any amino acid
  VARIANT 57: note = Any amino acid
  VARIANT 58: note = Any amino acid
  VARIANT 59: note = Any amino acid
  VARIANT 60: note = Any amino acid
  VARIANT 61: note = Any amino acid
  VARIANT 62: note = Any amino acid
  VARIANT 63: note = Any amino acid
  VARIANT 64: note = Any amino acid
  VARIANT 65: note = Any amino acid
  VARIANT 66: note = Any amino acid
  VARIANT 67: note = Any amino acid
  VARIANT 68: note = Any amino acid
  VARIANT 69: note = Any amino acid
  VARIANT 70: note = Any amino acid
  VARIANT 71: note = Any amino acid
  VARIANT 72: note = Any amino acid
  VARIANT 73: note = Any amino acid
  VARIANT 74: note = Any amino acid
  VARIANT 75: note = Any amino acid
  VARIANT 76: note = Any amino acid
  VARIANT 77: note = Any amino acid
  VARIANT 78: note = Any amino acid
  VARIANT 79: note = Any amino acid
  VARIANT 80: note = Any amino acid
  VARIANT 81: note = Any amino acid
  VARIANT 82: note = Any amino acid
  VARIANT 83: note = Any amino acid
  VARIANT 84: note = Any amino acid
  VARIANT 85: note = Any amino acid
  VARIANT 86: note = Any amino acid
  VARIANT 87: note = Any amino acid
  VARIANT 88: note = Any amino acid
  VARIANT 89: note = Any amino acid
  VARIANT 90: note = Any amino acid
  VARIANT 91: note = Any amino acid
  VARIANT 93: note = Any amino acid
  VARIANT 95: note = Any amino acid
  VARIANT 96: note = Any amino acid
DXXXXXXXXXXXXXXXXXXXXXXXXXXXXXXXXXXXXXXXXXXXXXXXXXGXXXXXXXXXXXXXXXXXXXXXXXXXXXXXXXXXXXXXXXXRXDXXD

SEQ ID NO: 795791 - protein, 103 aa, unidentified
  VARIANT 2: note = Any amino acid
  VARIANT 3: note = Any amino acid
  VARIANT 4: note = Any amino acid
  VARIANT 5: note = Any amino acid
  VARIANT 6: note = Any amino acid
  VARIANT 7: note = Any amino acid
  VARIANT 8: note = Any amino acid
  VARIANT 9: note = Any amino acid
  VARIANT 10: note = Any amino acid
  VARIANT 11: note = Any amino acid
  VARIANT 12: note = Any amino acid
  VARIANT 13: note = Any amino acid
  VARIANT 14: note = Any amino acid
  VARIANT 15: note = Any amino acid
  VARIANT 16: note = Any amino acid
  VARIANT 17: note = Any amino acid
  VARIANT 18: note = Any amino acid
  VARIANT 19: note = Any amino acid
  VARIANT 20: note = Any amino acid
  VARIANT 21: note = Any amino acid
  VARIANT 22: note = Any amino acid
  VARIANT 23: note = Any amino acid
  VARIANT 24: note = Any amino acid
  VARIANT 25: note = Any amino acid
  VARIANT 26: note = Any amino acid
  VARIANT 27: note = Any amino acid
  VARIANT 28: note = Any amino acid
  VARIANT 29: note = Any amino acid
  VARIANT 30: note = Any amino acid
  VARIANT 31: note = Any amino acid
  VARIANT 32: note = Any amino acid
  VARIANT 33: note = Any amino acid
  VARIANT 34: note = Any amino acid
  VARIANT 35: note = Any amino acid
  VARIANT 36: note = Any amino acid
  VARIANT 37: note = Any amino acid
  VARIANT 38: note = Any amino acid
  VARIANT 39: note = Any amino acid
  VARIANT 40: note = Any amino acid
  VARIANT 41: note = Any amino acid
  VARIANT 42: note = Any amino acid
  VARIANT 43: note = Any amino acid
  VARIANT 44: note = Any amino acid
  VARIANT 45: note = Any amino acid
  VARIANT 46: note = Any amino acid
  VARIANT 47: note = Any amino acid
  VARIANT 48: note = Any amino acid
  VARIANT 49: note = Any amino acid
  VARIANT 50: note = Any amino acid
  VARIANT 51: note = Any amino acid
  VARIANT 52: note = Any amino acid
  VARIANT 53: note = Any amino acid
  VARIANT 54: note = Any amino acid
  VARIANT 55: note = Any amino acid
  VARIANT 57: note = Any amino acid
  VARIANT 58: note = Any amino acid
  VARIANT 59: note = Any amino acid
  VARIANT 60: note = Any amino acid
  VARIANT 61: note = Any amino acid
  VARIANT 62: note = Any amino acid
  VARIANT 63: note = Any amino acid
  VARIANT 64: note = Any amino acid
  VARIANT 65: note = Any amino acid
  VARIANT 66: note = Any amino acid
  VARIANT 67: note = Any amino acid
  VARIANT 68: note = Any amino acid
  VARIANT 69: note = Any amino acid
  VARIANT 70: note = Any amino acid
  VARIANT 71: note = Any amino acid
  VARIANT 72: note = Any amino acid
  VARIANT 73: note = Any amino acid
  VARIANT 74: note = Any amino acid
  VARIANT 75: note = Any amino acid
  VARIANT 76: note = Any amino acid
  VARIANT 77: note = Any amino acid
  VARIANT 78: note = Any amino acid
  VARIANT 79: note = Any amino acid
  VARIANT 80: note = Any amino acid
  VARIANT 81: note = Any amino acid
  VARIANT 82: note = Any amino acid
  VARIANT 83: note = Any amino acid
  VARIANT 84: note = Any amino acid
  VARIANT 85: note = Any amino acid
  VARIANT 86: note = Any amino acid
  VARIANT 87: note = Any amino acid
  VARIANT 88: note = Any amino acid
  VARIANT 89: note = Any amino acid
  VARIANT 90: note = Any amino acid
  VARIANT 91: note = Any amino acid
  VARIANT 92: note = Any amino acid
  VARIANT 93: note = Any amino acid
  VARIANT 94: note = Any amino acid
  VARIANT 95: note = Any amino acid
  VARIANT 96: note = Any amino acid
  VARIANT 97: note = Any amino acid
  VARIANT 99: note = Any amino acid
  VARIANT 101: note = Any amino acid
  VARIANT 102: note = Any amino acid
DXXXXXXXXXXXXXXXXXXXXXXXXXXXXXXXXXXXXXXXXXXXXXXXXXXXXXXDXXXXXXXXXXXXXXXXXXXXXXXXXXXXXXXXXXXXXXXXXKXDXXD

SEQ ID NO: 795792 - protein, 102 aa, unidentified
  VARIANT 2: note = Any amino acid
  VARIANT 3: note = Any amino acid
  VARIANT 4: note = Any amino acid
  VARIANT 5: note = Any amino acid
  VARIANT 6: note = Any amino acid
  VARIANT 7: note = Any amino acid
  VARIANT 8: note = Any amino acid
  VARIANT 9: note = Any amino acid
  VARIANT 10: note = Any amino acid
  VARIANT 11: note = Any amino acid
  VARIANT 12: note = Any amino acid
  VARIANT 13: note = Any amino acid
  VARIANT 14: note = Any amino acid
  VARIANT 15: note = Any amino acid
  VARIANT 16: note = Any amino acid
  VARIANT 17: note = Any amino acid
  VARIANT 18: note = Any amino acid
  VARIANT 19: note = Any amino acid
  VARIANT 20: note = Any amino acid
  VARIANT 21: note = Any amino acid
  VARIANT 22: note = Any amino acid
  VARIANT 23: note = Any amino acid
  VARIANT 24: note = Any amino acid
  VARIANT 25: note = Any amino acid
  VARIANT 26: note = Any amino acid
  VARIANT 27: note = Any amino acid
  VARIANT 28: note = Any amino acid
  VARIANT 29: note = Any amino acid
  VARIANT 30: note = Any amino acid
  VARIANT 31: note = Any amino acid
  VARIANT 32: note = Any amino acid
  VARIANT 33: note = Any amino acid
  VARIANT 34: note = Any amino acid
  VARIANT 35: note = Any amino acid
  VARIANT 36: note = Any amino acid
  VARIANT 37: note = Any amino acid
  VARIANT 38: note = Any amino acid
  VARIANT 39: note = Any amino acid
  VARIANT 40: note = Any amino acid
  VARIANT 41: note = Any amino acid
  VARIANT 42: note = Any amino acid
  VARIANT 43: note = Any amino acid
  VARIANT 44: note = Any amino acid
  VARIANT 45: note = Any amino acid
  VARIANT 46: note = Any amino acid
  VARIANT 47: note = Any amino acid
  VARIANT 48: note = Any amino acid
  VARIANT 49: note = Any amino acid
  VARIANT 50: note = Any amino acid
  VARIANT 51: note = Any amino acid
  VARIANT 52: note = Any amino acid
  VARIANT 53: note = Any amino acid
  VARIANT 54: note = Any amino acid
  VARIANT 55: note = Any amino acid
  VARIANT 56: note = Any amino acid
  VARIANT 58: note = Any amino acid
  VARIANT 59: note = Any amino acid
  VARIANT 60: note = Any amino acid
  VARIANT 61: note = Any amino acid
  VARIANT 62: note = Any amino acid
  VARIANT 63: note = Any amino acid
  VARIANT 64: note = Any amino acid
  VARIANT 65: note = Any amino acid
  VARIANT 66: note = Any amino acid
  VARIANT 67: note = Any amino acid
  VARIANT 68: note = Any amino acid
  VARIANT 69: note = Any amino acid
  VARIANT 70: note = Any amino acid
  VARIANT 71: note = Any amino acid
  VARIANT 72: note = Any amino acid
  VARIANT 73: note = Any amino acid
  VARIANT 74: note = Any amino acid
  VARIANT 75: note = Any amino acid
  VARIANT 76: note = Any amino acid
  VARIANT 77: note = Any amino acid
  VARIANT 78: note = Any amino acid
  VARIANT 79: note = Any amino acid
  VARIANT 80: note = Any amino acid
  VARIANT 81: note = Any amino acid
  VARIANT 82: note = Any amino acid
  VARIANT 83: note = Any amino acid
  VARIANT 84: note = Any amino acid
  VARIANT 85: note = Any amino acid
  VARIANT 86: note = Any amino acid
  VARIANT 87: note = Any amino acid
  VARIANT 88: note = Any amino acid
  VARIANT 89: note = Any amino acid
  VARIANT 90: note = Any amino acid
  VARIANT 91: note = Any amino acid
  VARIANT 92: note = Any amino acid
  VARIANT 93: note = Any amino acid
  VARIANT 94: note = Any amino acid
  VARIANT 95: note = Any amino acid
  VARIANT 96: note = Any amino acid
  VARIANT 98: note = Any amino acid
  VARIANT 100: note = Any amino acid
  VARIANT 101: note = Any amino acid
DXXXXXXXXXXXXXXXXXXXXXXXXXXXXXXXXXXXXXXXXXXXXXXXXXXXXXXXGXXXXXXXXXXXXXXXXXXXXXXXXXXXXXXXXXXXXXXXKXDXXD

SEQ ID NO: 795793 - protein, 85 aa, unidentified
  VARIANT 2: note = Any amino acid
  VARIANT 3: note = Any amino acid
  VARIANT 4: note = Any amino acid
  VARIANT 5: note = Any amino acid
  VARIANT 6: note = Any amino acid
  VARIANT 7: note = Any amino acid
  VARIANT 8: note = Any amino acid
  VARIANT 9: note = Any amino acid
  VARIANT 10: note = Any amino acid
  VARIANT 11: note = Any amino acid
  VARIANT 12: note = Any amino acid
  VARIANT 13: note = Any amino acid
  VARIANT 14: note = Any amino acid
  VARIANT 15: note = Any amino acid
  VARIANT 16: note = Any amino acid
  VARIANT 17: note = Any amino acid
  VARIANT 18: note = Any amino acid
  VARIANT 19: note = Any amino acid
  VARIANT 20: note = Any amino acid
  VARIANT 21: note = Any amino acid
  VARIANT 22: note = Any amino acid
  VARIANT 23: note = Any amino acid
  VARIANT 24: note = Any amino acid
  VARIANT 25: note = Any amino acid
  VARIANT 26: note = Any amino acid
  VARIANT 27: note = Any amino acid
  VARIANT 28: note = Any amino acid
  VARIANT 29: note = Any amino acid
  VARIANT 30: note = Any amino acid
  VARIANT 31: note = Any amino acid
  VARIANT 32: note = Any amino acid
  VARIANT 33: note = Any amino acid
  VARIANT 34: note = Any amino acid
  VARIANT 35: note = Any amino acid
  VARIANT 36: note = Any amino acid
  VARIANT 37: note = Any amino acid
  VARIANT 38: note = Any amino acid
  VARIANT 39: note = Any amino acid
  VARIANT 40: note = Any amino acid
  VARIANT 41: note = Any amino acid
  VARIANT 42: note = Any amino acid
  VARIANT 43: note = Any amino acid
  VARIANT 44: note = Any amino acid
  VARIANT 46: note = Any amino acid
  VARIANT 47: note = Any amino acid
  VARIANT 48: note = Any amino acid
  VARIANT 49: note = Any amino acid
  VARIANT 50: note = Any amino acid
  VARIANT 51: note = Any amino acid
  VARIANT 52: note = Any amino acid
  VARIANT 53: note = Any amino acid
  VARIANT 54: note = Any amino acid
  VARIANT 55: note = Any amino acid
  VARIANT 56: note = Any amino acid
  VARIANT 57: note = Any amino acid
  VARIANT 58: note = Any amino acid
  VARIANT 59: note = Any amino acid
  VARIANT 60: note = Any amino acid
  VARIANT 61: note = Any amino acid
  VARIANT 62: note = Any amino acid
  VARIANT 63: note = Any amino acid
  VARIANT 64: note = Any amino acid
  VARIANT 65: note = Any amino acid
  VARIANT 66: note = Any amino acid
  VARIANT 67: note = Any amino acid
  VARIANT 68: note = Any amino acid
  VARIANT 69: note = Any amino acid
  VARIANT 70: note = Any amino acid
  VARIANT 71: note = Any amino acid
  VARIANT 72: note = Any amino acid
  VARIANT 73: note = Any amino acid
  VARIANT 74: note = Any amino acid
  VARIANT 75: note = Any amino acid
  VARIANT 76: note = Any amino acid
  VARIANT 77: note = Any amino acid
  VARIANT 78: note = Any amino acid
  VARIANT 79: note = Any amino acid
  VARIANT 81: note = Any amino acid
  VARIANT 83: note = Any amino acid
  VARIANT 84: note = Any amino acid
DXXXXXXXXXXXXXXXXXXXXXXXXXXXXXXXXXXXXXXXXXXXEXXXXXXXXXXXXXXXXXXXXXXXXXXXXXXXXXXKXDXXD

SEQ ID NO: 795794 - protein, 99 aa, unidentified
  VARIANT 2: note = Any amino acid
  VARIANT 3: note = Any amino acid
  VARIANT 4: note = Any amino acid
  VARIANT 5: note = Any amino acid
  VARIANT 6: note = Any amino acid
  VARIANT 7: note = Any amino acid
  VARIANT 8: note = Any amino acid
  VARIANT 9: note = Any amino acid
  VARIANT 10: note = Any amino acid
  VARIANT 11: note = Any amino acid
  VARIANT 12: note = Any amino acid
  VARIANT 13: note = Any amino acid
  VARIANT 14: note = Any amino acid
  VARIANT 15: note = Any amino acid
  VARIANT 16: note = Any amino acid
  VARIANT 17: note = Any amino acid
  VARIANT 18: note = Any amino acid
  VARIANT 19: note = Any amino acid
  VARIANT 20: note = Any amino acid
  VARIANT 21: note = Any amino acid
  VARIANT 22: note = Any amino acid
  VARIANT 23: note = Any amino acid
  VARIANT 24: note = Any amino acid
  VARIANT 25: note = Any amino acid
  VARIANT 26: note = Any amino acid
  VARIANT 27: note = Any amino acid
  VARIANT 28: note = Any amino acid
  VARIANT 29: note = Any amino acid
  VARIANT 30: note = Any amino acid
  VARIANT 31: note = Any amino acid
  VARIANT 32: note = Any amino acid
  VARIANT 33: note = Any amino acid
  VARIANT 34: note = Any amino acid
  VARIANT 35: note = Any amino acid
  VARIANT 36: note = Any amino acid
  VARIANT 37: note = Any amino acid
  VARIANT 38: note = Any amino acid
  VARIANT 39: note = Any amino acid
  VARIANT 40: note = Any amino acid
  VARIANT 41: note = Any amino acid
  VARIANT 42: note = Any amino acid
  VARIANT 43: note = Any amino acid
  VARIANT 44: note = Any amino acid
  VARIANT 45: note = Any amino acid
  VARIANT 46: note = Any amino acid
  VARIANT 47: note = Any amino acid
  VARIANT 48: note = Any amino acid
  VARIANT 49: note = Any amino acid
  VARIANT 50: note = Any amino acid
  VARIANT 51: note = Any amino acid
  VARIANT 52: note = Any amino acid
  VARIANT 53: note = Any amino acid
  VARIANT 55: note = Any amino acid
  VARIANT 56: note = Any amino acid
  VARIANT 57: note = Any amino acid
  VARIANT 58: note = Any amino acid
  VARIANT 59: note = Any amino acid
  VARIANT 60: note = Any amino acid
  VARIANT 61: note = Any amino acid
  VARIANT 62: note = Any amino acid
  VARIANT 63: note = Any amino acid
  VARIANT 64: note = Any amino acid
  VARIANT 65: note = Any amino acid
  VARIANT 66: note = Any amino acid
  VARIANT 67: note = Any amino acid
  VARIANT 68: note = Any amino acid
  VARIANT 69: note = Any amino acid
  VARIANT 70: note = Any amino acid
  VARIANT 71: note = Any amino acid
  VARIANT 72: note = Any amino acid
  VARIANT 73: note = Any amino acid
  VARIANT 74: note = Any amino acid
  VARIANT 75: note = Any amino acid
  VARIANT 76: note = Any amino acid
  VARIANT 77: note = Any amino acid
  VARIANT 78: note = Any amino acid
  VARIANT 79: note = Any amino acid
  VARIANT 80: note = Any amino acid
  VARIANT 81: note = Any amino acid
  VARIANT 82: note = Any amino acid
  VARIANT 83: note = Any amino acid
  VARIANT 84: note = Any amino acid
  VARIANT 85: note = Any amino acid
  VARIANT 86: note = Any amino acid
  VARIANT 87: note = Any amino acid
  VARIANT 88: note = Any amino acid
  VARIANT 89: note = Any amino acid
  VARIANT 90: note = Any amino acid
  VARIANT 91: note = Any amino acid
  VARIANT 92: note = Any amino acid
  VARIANT 93: note = Any amino acid
  VARIANT 95: note = Any amino acid
  VARIANT 97: note = Any amino acid
  VARIANT 98: note = Any amino acid
DXXXXXXXXXXXXXXXXXXXXXXXXXXXXXXXXXXXXXXXXXXXXXXXXXXXXAXXXXXXXXXXXXXXXXXXXXXXXXXXXXXXXXXXXXXXXKXDXXD

SEQ ID NO: 795795 - protein, 107 aa, unidentified
  VARIANT 2: note = Any amino acid
  VARIANT 3: note = Any amino acid
  VARIANT 4: note = Any amino acid
  VARIANT 5: note = Any amino acid
  VARIANT 6: note = Any amino acid
  VARIANT 7: note = Any amino acid
  VARIANT 8: note = Any amino acid
  VARIANT 9: note = Any amino acid
  VARIANT 10: note = Any amino acid
  VARIANT 11: note = Any amino acid
  VARIANT 12: note = Any amino acid
  VARIANT 13: note = Any amino acid
  VARIANT 14: note = Any amino acid
  VARIANT 15: note = Any amino acid
  VARIANT 16: note = Any amino acid
  VARIANT 17: note = Any amino acid
  VARIANT 18: note = Any amino acid
  VARIANT 19: note = Any amino acid
  VARIANT 20: note = Any amino acid
  VARIANT 21: note = Any amino acid
  VARIANT 22: note = Any amino acid
  VARIANT 23: note = Any amino acid
  VARIANT 24: note = Any amino acid
  VARIANT 25: note = Any amino acid
  VARIANT 26: note = Any amino acid
  VARIANT 27: note = Any amino acid
  VARIANT 28: note = Any amino acid
  VARIANT 29: note = Any amino acid
  VARIANT 30: note = Any amino acid
  VARIANT 31: note = Any amino acid
  VARIANT 32: note = Any amino acid
  VARIANT 33: note = Any amino acid
  VARIANT 34: note = Any amino acid
  VARIANT 35: note = Any amino acid
  VARIANT 36: note = Any amino acid
  VARIANT 37: note = Any amino acid
  VARIANT 38: note = Any amino acid
  VARIANT 39: note = Any amino acid
  VARIANT 40: note = Any amino acid
  VARIANT 41: note = Any amino acid
  VARIANT 42: note = Any amino acid
  VARIANT 43: note = Any amino acid
  VARIANT 44: note = Any amino acid
  VARIANT 45: note = Any amino acid
  VARIANT 46: note = Any amino acid
  VARIANT 47: note = Any amino acid
  VARIANT 48: note = Any amino acid
  VARIANT 49: note = Any amino acid
  VARIANT 50: note = Any amino acid
  VARIANT 51: note = Any amino acid
  VARIANT 52: note = Any amino acid
  VARIANT 53: note = Any amino acid
  VARIANT 54: note = Any amino acid
  VARIANT 55: note = Any amino acid
  VARIANT 56: note = Any amino acid
  VARIANT 57: note = Any amino acid
  VARIANT 58: note = Any amino acid
  VARIANT 59: note = Any amino acid
  VARIANT 60: note = Any amino acid
  VARIANT 61: note = Any amino acid
  VARIANT 63: note = Any amino acid
  VARIANT 64: note = Any amino acid
  VARIANT 65: note = Any amino acid
  VARIANT 66: note = Any amino acid
  VARIANT 67: note = Any amino acid
  VARIANT 68: note = Any amino acid
  VARIANT 69: note = Any amino acid
  VARIANT 70: note = Any amino acid
  VARIANT 71: note = Any amino acid
  VARIANT 72: note = Any amino acid
  VARIANT 73: note = Any amino acid
  VARIANT 74: note = Any amino acid
  VARIANT 75: note = Any amino acid
  VARIANT 76: note = Any amino acid
  VARIANT 77: note = Any amino acid
  VARIANT 78: note = Any amino acid
  VARIANT 79: note = Any amino acid
  VARIANT 80: note = Any amino acid
  VARIANT 81: note = Any amino acid
  VARIANT 82: note = Any amino acid
  VARIANT 83: note = Any amino acid
  VARIANT 84: note = Any amino acid
  VARIANT 85: note = Any amino acid
  VARIANT 86: note = Any amino acid
  VARIANT 87: note = Any amino acid
  VARIANT 88: note = Any amino acid
  VARIANT 89: note = Any amino acid
  VARIANT 90: note = Any amino acid
  VARIANT 91: note = Any amino acid
  VARIANT 92: note = Any amino acid
  VARIANT 93: note = Any amino acid
  VARIANT 94: note = Any amino acid
  VARIANT 95: note = Any amino acid
  VARIANT 96: note = Any amino acid
  VARIANT 97: note = Any amino acid
  VARIANT 98: note = Any amino acid
  VARIANT 99: note = Any amino acid
  VARIANT 100: note = Any amino acid
  VARIANT 101: note = Any amino acid
  VARIANT 103: note = Any amino acid
  VARIANT 105: note = Any amino acid
  VARIANT 106: note = Any amino acid
DXXXXXXXXXXXXXXXXXXXXXXXXXXXXXXXXXXXXXXXXXXXXXXXXXXXXXXXXXXXXGXXXXXXXXXXXXXXXXXXXXXXXXXXXXXXXXXXXXXXXKXDXXD

SEQ ID NO: 795796 - protein, 110 aa, unidentified
  VARIANT 2: note = Any amino acid
  VARIANT 3: note = Any amino acid
  VARIANT 4: note = Any amino acid
  VARIANT 5: note = Any amino acid
  VARIANT 6: note = Any amino acid
  VARIANT 7: note = Any amino acid
  VARIANT 8: note = Any amino acid
  VARIANT 9: note = Any amino acid
  VARIANT 10: note = Any amino acid
  VARIANT 11: note = Any amino acid
  VARIANT 12: note = Any amino acid
  VARIANT 13: note = Any amino acid
  VARIANT 14: note = Any amino acid
  VARIANT 15: note = Any amino acid
  VARIANT 16: note = Any amino acid
  VARIANT 17: note = Any amino acid
  VARIANT 18: note = Any amino acid
  VARIANT 19: note = Any amino acid
  VARIANT 20: note = Any amino acid
  VARIANT 21: note = Any amino acid
  VARIANT 22: note = Any amino acid
  VARIANT 23: note = Any amino acid
  VARIANT 24: note = Any amino acid
  VARIANT 25: note = Any amino acid
  VARIANT 26: note = Any amino acid
  VARIANT 27: note = Any amino acid
  VARIANT 28: note = Any amino acid
  VARIANT 29: note = Any amino acid
  VARIANT 30: note = Any amino acid
  VARIANT 31: note = Any amino acid
  VARIANT 32: note = Any amino acid
  VARIANT 33: note = Any amino acid
  VARIANT 34: note = Any amino acid
  VARIANT 35: note = Any amino acid
  VARIANT 36: note = Any amino acid
  VARIANT 37: note = Any amino acid
  VARIANT 38: note = Any amino acid
  VARIANT 39: note = Any amino acid
  VARIANT 40: note = Any amino acid
  VARIANT 41: note = Any amino acid
  VARIANT 42: note = Any amino acid
  VARIANT 43: note = Any amino acid
  VARIANT 44: note = Any amino acid
  VARIANT 45: note = Any amino acid
  VARIANT 46: note = Any amino acid
  VARIANT 47: note = Any amino acid
  VARIANT 48: note = Any amino acid
  VARIANT 49: note = Any amino acid
  VARIANT 50: note = Any amino acid
  VARIANT 51: note = Any amino acid
  VARIANT 52: note = Any amino acid
  VARIANT 53: note = Any amino acid
  VARIANT 54: note = Any amino acid
  VARIANT 55: note = Any amino acid
  VARIANT 56: note = Any amino acid
  VARIANT 57: note = Any amino acid
  VARIANT 58: note = Any amino acid
  VARIANT 59: note = Any amino acid
  VARIANT 60: note = Any amino acid
  VARIANT 61: note = Any amino acid
  VARIANT 62: note = Any amino acid
  VARIANT 63: note = Any amino acid
  VARIANT 64: note = Any amino acid
  VARIANT 66: note = Any amino acid
  VARIANT 67: note = Any amino acid
  VARIANT 68: note = Any amino acid
  VARIANT 69: note = Any amino acid
  VARIANT 70: note = Any amino acid
  VARIANT 71: note = Any amino acid
  VARIANT 72: note = Any amino acid
  VARIANT 73: note = Any amino acid
  VARIANT 74: note = Any amino acid
  VARIANT 75: note = Any amino acid
  VARIANT 76: note = Any amino acid
  VARIANT 77: note = Any amino acid
  VARIANT 78: note = Any amino acid
  VARIANT 79: note = Any amino acid
  VARIANT 80: note = Any amino acid
  VARIANT 81: note = Any amino acid
  VARIANT 82: note = Any amino acid
  VARIANT 83: note = Any amino acid
  VARIANT 84: note = Any amino acid
  VARIANT 85: note = Any amino acid
  VARIANT 86: note = Any amino acid
  VARIANT 87: note = Any amino acid
  VARIANT 88: note = Any amino acid
  VARIANT 89: note = Any amino acid
  VARIANT 90: note = Any amino acid
  VARIANT 91: note = Any amino acid
  VARIANT 92: note = Any amino acid
  VARIANT 93: note = Any amino acid
  VARIANT 94: note = Any amino acid
  VARIANT 95: note = Any amino acid
  VARIANT 96: note = Any amino acid
  VARIANT 97: note = Any amino acid
  VARIANT 98: note = Any amino acid
  VARIANT 99: note = Any amino acid
  VARIANT 100: note = Any amino acid
  VARIANT 101: note = Any amino acid
  VARIANT 102: note = Any amino acid
  VARIANT 103: note = Any amino acid
  VARIANT 104: note = Any amino acid
  VARIANT 106: note = Any amino acid
  VARIANT 108: note = Any amino acid
  VARIANT 109: note = Any amino acid
DXXXXXXXXXXXXXXXXXXXXXXXXXXXXXXXXXXXXXXXXXXXXXXXXXXXXXXXXXXXXXXXEXXXXXXXXXXXXXXXXXXXXXXXXXXXXXXXXXXXXXXXKXDXXD

SEQ ID NO: 795797 - protein, 96 aa, unidentified
  VARIANT 2: note = Any amino acid
  VARIANT 3: note = Any amino acid
  VARIANT 4: note = Any amino acid
  VARIANT 5: note = Any amino acid
  VARIANT 6: note = Any amino acid
  VARIANT 7: note = Any amino acid
  VARIANT 8: note = Any amino acid
  VARIANT 9: note = Any amino acid
  VARIANT 10: note = Any amino acid
  VARIANT 11: note = Any amino acid
  VARIANT 12: note = Any amino acid
  VARIANT 13: note = Any amino acid
  VARIANT 14: note = Any amino acid
  VARIANT 15: note = Any amino acid
  VARIANT 16: note = Any amino acid
  VARIANT 17: note = Any amino acid
  VARIANT 18: note = Any amino acid
  VARIANT 19: note = Any amino acid
  VARIANT 20: note = Any amino acid
  VARIANT 21: note = Any amino acid
  VARIANT 22: note = Any amino acid
  VARIANT 23: note = Any amino acid
  VARIANT 24: note = Any amino acid
  VARIANT 25: note = Any amino acid
  VARIANT 26: note = Any amino acid
  VARIANT 27: note = Any amino acid
  VARIANT 28: note = Any amino acid
  VARIANT 29: note = Any amino acid
  VARIANT 30: note = Any amino acid
  VARIANT 31: note = Any amino acid
  VARIANT 32: note = Any amino acid
  VARIANT 33: note = Any amino acid
  VARIANT 34: note = Any amino acid
  VARIANT 35: note = Any amino acid
  VARIANT 36: note = Any amino acid
  VARIANT 37: note = Any amino acid
  VARIANT 38: note = Any amino acid
  VARIANT 39: note = Any amino acid
  VARIANT 40: note = Any amino acid
  VARIANT 41: note = Any amino acid
  VARIANT 42: note = Any amino acid
  VARIANT 43: note = Any amino acid
  VARIANT 44: note = Any amino acid
  VARIANT 45: note = Any amino acid
  VARIANT 46: note = Any amino acid
  VARIANT 47: note = Any amino acid
  VARIANT 48: note = Any amino acid
  VARIANT 49: note = Any amino acid
  VARIANT 50: note = Any amino acid
  VARIANT 52: note = Any amino acid
  VARIANT 53: note = Any amino acid
  VARIANT 54: note = Any amino acid
  VARIANT 55: note = Any amino acid
  VARIANT 56: note = Any amino acid
  VARIANT 57: note = Any amino acid
  VARIANT 58: note = Any amino acid
  VARIANT 59: note = Any amino acid
  VARIANT 60: note = Any amino acid
  VARIANT 61: note = Any amino acid
  VARIANT 62: note = Any amino acid
  VARIANT 63: note = Any amino acid
  VARIANT 64: note = Any amino acid
  VARIANT 65: note = Any amino acid
  VARIANT 66: note = Any amino acid
  VARIANT 67: note = Any amino acid
  VARIANT 68: note = Any amino acid
  VARIANT 69: note = Any amino acid
  VARIANT 70: note = Any amino acid
  VARIANT 71: note = Any amino acid
  VARIANT 72: note = Any amino acid
  VARIANT 73: note = Any amino acid
  VARIANT 74: note = Any amino acid
  VARIANT 75: note = Any amino acid
  VARIANT 76: note = Any amino acid
  VARIANT 77: note = Any amino acid
  VARIANT 78: note = Any amino acid
  VARIANT 79: note = Any amino acid
  VARIANT 80: note = Any amino acid
  VARIANT 81: note = Any amino acid
  VARIANT 82: note = Any amino acid
  VARIANT 83: note = Any amino acid
  VARIANT 84: note = Any amino acid
  VARIANT 85: note = Any amino acid
  VARIANT 86: note = Any amino acid
  VARIANT 87: note = Any amino acid
  VARIANT 88: note = Any amino acid
  VARIANT 89: note = Any amino acid
  VARIANT 90: note = Any amino acid
  VARIANT 92: note = Any amino acid
  VARIANT 94: note = Any amino acid
  VARIANT 95: note = Any amino acid
DXXXXXXXXXXXXXXXXXXXXXXXXXXXXXXXXXXXXXXXXXXXXXXXXXDXXXXXXXXXXXXXXXXXXXXXXXXXXXXXXXXXXXXXXXKXDXXD

SEQ ID NO: 795798 - protein, 93 aa, unidentified
  VARIANT 2: note = Any amino acid
  VARIANT 3: note = Any amino acid
  VARIANT 4: note = Any amino acid
  VARIANT 5: note = Any amino acid
  VARIANT 6: note = Any amino acid
  VARIANT 7: note = Any amino acid
  VARIANT 8: note = Any amino acid
  VARIANT 9: note = Any amino acid
  VARIANT 10: note = Any amino acid
  VARIANT 11: note = Any amino acid
  VARIANT 12: note = Any amino acid
  VARIANT 13: note = Any amino acid
  VARIANT 14: note = Any amino acid
  VARIANT 15: note = Any amino acid
  VARIANT 16: note = Any amino acid
  VARIANT 17: note = Any amino acid
  VARIANT 18: note = Any amino acid
  VARIANT 19: note = Any amino acid
  VARIANT 20: note = Any amino acid
  VARIANT 21: note = Any amino acid
  VARIANT 22: note = Any amino acid
  VARIANT 23: note = Any amino acid
  VARIANT 24: note = Any amino acid
  VARIANT 25: note = Any amino acid
  VARIANT 26: note = Any amino acid
  VARIANT 27: note = Any amino acid
  VARIANT 28: note = Any amino acid
  VARIANT 29: note = Any amino acid
  VARIANT 30: note = Any amino acid
  VARIANT 31: note = Any amino acid
  VARIANT 32: note = Any amino acid
  VARIANT 33: note = Any amino acid
  VARIANT 34: note = Any amino acid
  VARIANT 35: note = Any amino acid
  VARIANT 36: note = Any amino acid
  VARIANT 37: note = Any amino acid
  VARIANT 38: note = Any amino acid
  VARIANT 39: note = Any amino acid
  VARIANT 40: note = Any amino acid
  VARIANT 41: note = Any amino acid
  VARIANT 42: note = Any amino acid
  VARIANT 43: note = Any amino acid
  VARIANT 44: note = Any amino acid
  VARIANT 45: note = Any amino acid
  VARIANT 46: note = Any amino acid
  VARIANT 47: note = Any amino acid
  VARIANT 48: note = Any amino acid
  VARIANT 49: note = Any amino acid
  VARIANT 50: note = Any amino acid
  VARIANT 52: note = Any amino acid
  VARIANT 53: note = Any amino acid
  VARIANT 54: note = Any amino acid
  VARIANT 55: note = Any amino acid
  VARIANT 56: note = Any amino acid
  VARIANT 57: note = Any amino acid
  VARIANT 58: note = Any amino acid
  VARIANT 59: note = Any amino acid
  VARIANT 60: note = Any amino acid
  VARIANT 61: note = Any amino acid
  VARIANT 62: note = Any amino acid
  VARIANT 63: note = Any amino acid
  VARIANT 64: note = Any amino acid
  VARIANT 65: note = Any amino acid
  VARIANT 66: note = Any amino acid
  VARIANT 67: note = Any amino acid
  VARIANT 68: note = Any amino acid
  VARIANT 69: note = Any amino acid
  VARIANT 70: note = Any amino acid
  VARIANT 71: note = Any amino acid
  VARIANT 72: note = Any amino acid
  VARIANT 73: note = Any amino acid
  VARIANT 74: note = Any amino acid
  VARIANT 75: note = Any amino acid
  VARIANT 76: note = Any amino acid
  VARIANT 77: note = Any amino acid
  VARIANT 78: note = Any amino acid
  VARIANT 79: note = Any amino acid
  VARIANT 80: note = Any amino acid
  VARIANT 81: note = Any amino acid
  VARIANT 82: note = Any amino acid
  VARIANT 83: note = Any amino acid
  VARIANT 84: note = Any amino acid
  VARIANT 85: note = Any amino acid
  VARIANT 86: note = Any amino acid
  VARIANT 87: note = Any amino acid
  VARIANT 89: note = Any amino acid
  VARIANT 91: note = Any amino acid
  VARIANT 92: note = Any amino acid
DXXXXXXXXXXXXXXXXXXXXXXXXXXXXXXXXXXXXXXXXXXXXXXXXXVXXXXXXXXXXXXXXXXXXXXXXXXXXXXXXXXXXXXKXDXXD

SEQ ID NO: 795799 - protein, 96 aa, unidentified
  VARIANT 2: note = Any amino acid
  VARIANT 3: note = Any amino acid
  VARIANT 4: note = Any amino acid
  VARIANT 5: note = Any amino acid
  VARIANT 6: note = Any amino acid
  VARIANT 7: note = Any amino acid
  VARIANT 8: note = Any amino acid
  VARIANT 9: note = Any amino acid
  VARIANT 10: note = Any amino acid
  VARIANT 11: note = Any amino acid
  VARIANT 12: note = Any amino acid
  VARIANT 13: note = Any amino acid
  VARIANT 14: note = Any amino acid
  VARIANT 15: note = Any amino acid
  VARIANT 16: note = Any amino acid
  VARIANT 17: note = Any amino acid
  VARIANT 18: note = Any amino acid
  VARIANT 19: note = Any amino acid
  VARIANT 20: note = Any amino acid
  VARIANT 21: note = Any amino acid
  VARIANT 22: note = Any amino acid
  VARIANT 23: note = Any amino acid
  VARIANT 24: note = Any amino acid
  VARIANT 25: note = Any amino acid
  VARIANT 26: note = Any amino acid
  VARIANT 27: note = Any amino acid
  VARIANT 28: note = Any amino acid
  VARIANT 29: note = Any amino acid
  VARIANT 30: note = Any amino acid
  VARIANT 31: note = Any amino acid
  VARIANT 32: note = Any amino acid
  VARIANT 33: note = Any amino acid
  VARIANT 34: note = Any amino acid
  VARIANT 35: note = Any amino acid
  VARIANT 36: note = Any amino acid
  VARIANT 37: note = Any amino acid
  VARIANT 38: note = Any amino acid
  VARIANT 39: note = Any amino acid
  VARIANT 40: note = Any amino acid
  VARIANT 41: note = Any amino acid
  VARIANT 42: note = Any amino acid
  VARIANT 43: note = Any amino acid
  VARIANT 44: note = Any amino acid
  VARIANT 45: note = Any amino acid
  VARIANT 46: note = Any amino acid
  VARIANT 47: note = Any amino acid
  VARIANT 48: note = Any amino acid
  VARIANT 49: note = Any amino acid
  VARIANT 50: note = Any amino acid
  VARIANT 51: note = Any amino acid
  VARIANT 52: note = Any amino acid
  VARIANT 54: note = Any amino acid
  VARIANT 55: note = Any amino acid
  VARIANT 56: note = Any amino acid
  VARIANT 57: note = Any amino acid
  VARIANT 58: note = Any amino acid
  VARIANT 59: note = Any amino acid
  VARIANT 60: note = Any amino acid
  VARIANT 61: note = Any amino acid
  VARIANT 62: note = Any amino acid
  VARIANT 63: note = Any amino acid
  VARIANT 64: note = Any amino acid
  VARIANT 65: note = Any amino acid
  VARIANT 66: note = Any amino acid
  VARIANT 67: note = Any amino acid
  VARIANT 68: note = Any amino acid
  VARIANT 69: note = Any amino acid
  VARIANT 70: note = Any amino acid
  VARIANT 71: note = Any amino acid
  VARIANT 72: note = Any amino acid
  VARIANT 73: note = Any amino acid
  VARIANT 74: note = Any amino acid
  VARIANT 75: note = Any amino acid
  VARIANT 76: note = Any amino acid
  VARIANT 77: note = Any amino acid
  VARIANT 78: note = Any amino acid
  VARIANT 79: note = Any amino acid
  VARIANT 80: note = Any amino acid
  VARIANT 81: note = Any amino acid
  VARIANT 82: note = Any amino acid
  VARIANT 83: note = Any amino acid
  VARIANT 84: note = Any amino acid
  VARIANT 85: note = Any amino acid
  VARIANT 86: note = Any amino acid
  VARIANT 87: note = Any amino acid
  VARIANT 88: note = Any amino acid
  VARIANT 89: note = Any amino acid
  VARIANT 90: note = Any amino acid
  VARIANT 92: note = Any amino acid
  VARIANT 94: note = Any amino acid
  VARIANT 95: note = Any amino acid
DXXXXXXXXXXXXXXXXXXXXXXXXXXXXXXXXXXXXXXXXXXXXXXXXXXXCXXXXXXXXXXXXXXXXXXXXXXXXXXXXXXXXXXXXXKXDXXD

SEQ ID NO: 795800 - protein, 100 aa, unidentified
  VARIANT 2: note = Any amino acid
  VARIANT 3: note = Any amino acid
  VARIANT 4: note = Any amino acid
  VARIANT 5: note = Any amino acid
  VARIANT 6: note = Any amino acid
  VARIANT 7: note = Any amino acid
  VARIANT 8: note = Any amino acid
  VARIANT 9: note = Any amino acid
  VARIANT 10: note = Any amino acid
  VARIANT 11: note = Any amino acid
  VARIANT 12: note = Any amino acid
  VARIANT 13: note = Any amino acid
  VARIANT 14: note = Any amino acid
  VARIANT 15: note = Any amino acid
  VARIANT 16: note = Any amino acid
  VARIANT 17: note = Any amino acid
  VARIANT 18: note = Any amino acid
  VARIANT 19: note = Any amino acid
  VARIANT 20: note = Any amino acid
  VARIANT 21: note = Any amino acid
  VARIANT 22: note = Any amino acid
  VARIANT 23: note = Any amino acid
  VARIANT 24: note = Any amino acid
  VARIANT 25: note = Any amino acid
  VARIANT 26: note = Any amino acid
  VARIANT 27: note = Any amino acid
  VARIANT 28: note = Any amino acid
  VARIANT 29: note = Any amino acid
  VARIANT 30: note = Any amino acid
  VARIANT 31: note = Any amino acid
  VARIANT 32: note = Any amino acid
  VARIANT 33: note = Any amino acid
  VARIANT 34: note = Any amino acid
  VARIANT 35: note = Any amino acid
  VARIANT 36: note = Any amino acid
  VARIANT 37: note = Any amino acid
  VARIANT 38: note = Any amino acid
  VARIANT 39: note = Any amino acid
  VARIANT 40: note = Any amino acid
  VARIANT 41: note = Any amino acid
  VARIANT 42: note = Any amino acid
  VARIANT 43: note = Any amino acid
  VARIANT 44: note = Any amino acid
  VARIANT 45: note = Any amino acid
  VARIANT 46: note = Any amino acid
  VARIANT 47: note = Any amino acid
  VARIANT 48: note = Any amino acid
  VARIANT 49: note = Any amino acid
  VARIANT 50: note = Any amino acid
  VARIANT 51: note = Any amino acid
  VARIANT 52: note = Any amino acid
  VARIANT 53: note = Any amino acid
  VARIANT 55: note = Any amino acid
  VARIANT 56: note = Any amino acid
  VARIANT 57: note = Any amino acid
  VARIANT 58: note = Any amino acid
  VARIANT 59: note = Any amino acid
  VARIANT 60: note = Any amino acid
  VARIANT 61: note = Any amino acid
  VARIANT 62: note = Any amino acid
  VARIANT 63: note = Any amino acid
  VARIANT 64: note = Any amino acid
  VARIANT 65: note = Any amino acid
  VARIANT 66: note = Any amino acid
  VARIANT 67: note = Any amino acid
  VARIANT 68: note = Any amino acid
  VARIANT 69: note = Any amino acid
  VARIANT 70: note = Any amino acid
  VARIANT 71: note = Any amino acid
  VARIANT 72: note = Any amino acid
  VARIANT 73: note = Any amino acid
  VARIANT 74: note = Any amino acid
  VARIANT 75: note = Any amino acid
  VARIANT 76: note = Any amino acid
  VARIANT 77: note = Any amino acid
  VARIANT 78: note = Any amino acid
  VARIANT 79: note = Any amino acid
  VARIANT 80: note = Any amino acid
  VARIANT 81: note = Any amino acid
  VARIANT 82: note = Any amino acid
  VARIANT 83: note = Any amino acid
  VARIANT 84: note = Any amino acid
  VARIANT 85: note = Any amino acid
  VARIANT 86: note = Any amino acid
  VARIANT 87: note = Any amino acid
  VARIANT 88: note = Any amino acid
  VARIANT 89: note = Any amino acid
  VARIANT 90: note = Any amino acid
  VARIANT 91: note = Any amino acid
  VARIANT 92: note = Any amino acid
  VARIANT 93: note = Any amino acid
  VARIANT 94: note = Any amino acid
  VARIANT 96: note = Any amino acid
  VARIANT 98: note = Any amino acid
  VARIANT 99: note = Any amino acid
DXXXXXXXXXXXXXXXXXXXXXXXXXXXXXXXXXXXXXXXXXXXXXXXXXXXXEXXXXXXXXXXXXXXXXXXXXXXXXXXXXXXXXXXXXXXXXTXDXXD

SEQ ID NO: 795801 - protein, 105 aa, unidentified
  VARIANT 2: note = Any amino acid
  VARIANT 3: note = Any amino acid
  VARIANT 4: note = Any amino acid
  VARIANT 5: note = Any amino acid
  VARIANT 6: note = Any amino acid
  VARIANT 7: note = Any amino acid
  VARIANT 8: note = Any amino acid
  VARIANT 9: note = Any amino acid
  VARIANT 10: note = Any amino acid
  VARIANT 11: note = Any amino acid
  VARIANT 12: note = Any amino acid
  VARIANT 13: note = Any amino acid
  VARIANT 14: note = Any amino acid
  VARIANT 15: note = Any amino acid
  VARIANT 16: note = Any amino acid
  VARIANT 17: note = Any amino acid
  VARIANT 18: note = Any amino acid
  VARIANT 19: note = Any amino acid
  VARIANT 20: note = Any amino acid
  VARIANT 21: note = Any amino acid
  VARIANT 22: note = Any amino acid
  VARIANT 23: note = Any amino acid
  VARIANT 24: note = Any amino acid
  VARIANT 25: note = Any amino acid
  VARIANT 26: note = Any amino acid
  VARIANT 27: note = Any amino acid
  VARIANT 28: note = Any amino acid
  VARIANT 29: note = Any amino acid
  VARIANT 30: note = Any amino acid
  VARIANT 31: note = Any amino acid
  VARIANT 32: note = Any amino acid
  VARIANT 33: note = Any amino acid
  VARIANT 34: note = Any amino acid
  VARIANT 35: note = Any amino acid
  VARIANT 36: note = Any amino acid
  VARIANT 37: note = Any amino acid
  VARIANT 38: note = Any amino acid
  VARIANT 39: note = Any amino acid
  VARIANT 40: note = Any amino acid
  VARIANT 41: note = Any amino acid
  VARIANT 42: note = Any amino acid
  VARIANT 43: note = Any amino acid
  VARIANT 44: note = Any amino acid
  VARIANT 45: note = Any amino acid
  VARIANT 46: note = Any amino acid
  VARIANT 47: note = Any amino acid
  VARIANT 48: note = Any amino acid
  VARIANT 49: note = Any amino acid
  VARIANT 50: note = Any amino acid
  VARIANT 51: note = Any amino acid
  VARIANT 52: note = Any amino acid
  VARIANT 53: note = Any amino acid
  VARIANT 54: note = Any amino acid
  VARIANT 55: note = Any amino acid
  VARIANT 57: note = Any amino acid
  VARIANT 58: note = Any amino acid
  VARIANT 59: note = Any amino acid
  VARIANT 60: note = Any amino acid
  VARIANT 61: note = Any amino acid
  VARIANT 62: note = Any amino acid
  VARIANT 63: note = Any amino acid
  VARIANT 64: note = Any amino acid
  VARIANT 65: note = Any amino acid
  VARIANT 66: note = Any amino acid
  VARIANT 67: note = Any amino acid
  VARIANT 68: note = Any amino acid
  VARIANT 69: note = Any amino acid
  VARIANT 70: note = Any amino acid
  VARIANT 71: note = Any amino acid
  VARIANT 72: note = Any amino acid
  VARIANT 73: note = Any amino acid
  VARIANT 74: note = Any amino acid
  VARIANT 75: note = Any amino acid
  VARIANT 76: note = Any amino acid
  VARIANT 77: note = Any amino acid
  VARIANT 78: note = Any amino acid
  VARIANT 79: note = Any amino acid
  VARIANT 80: note = Any amino acid
  VARIANT 81: note = Any amino acid
  VARIANT 82: note = Any amino acid
  VARIANT 83: note = Any amino acid
  VARIANT 84: note = Any amino acid
  VARIANT 85: note = Any amino acid
  VARIANT 86: note = Any amino acid
  VARIANT 87: note = Any amino acid
  VARIANT 88: note = Any amino acid
  VARIANT 89: note = Any amino acid
  VARIANT 90: note = Any amino acid
  VARIANT 91: note = Any amino acid
  VARIANT 92: note = Any amino acid
  VARIANT 93: note = Any amino acid
  VARIANT 94: note = Any amino acid
  VARIANT 95: note = Any amino acid
  VARIANT 96: note = Any amino acid
  VARIANT 97: note = Any amino acid
  VARIANT 98: note = Any amino acid
  VARIANT 99: note = Any amino acid
  VARIANT 101: note = Any amino acid
  VARIANT 103: note = Any amino acid
  VARIANT 104: note = Any amino acid
DXXXXXXXXXXXXXXXXXXXXXXXXXXXXXXXXXXXXXXXXXXXXXXXXXXXXXXEXXXXXXXXXXXXXXXXXXXXXXXXXXXXXXXXXXXXXXXXXXXKXDXXD

SEQ ID NO: 795802 - protein, 102 aa, unidentified
  VARIANT 2: note = Any amino acid
  VARIANT 3: note = Any amino acid
  VARIANT 4: note = Any amino acid
  VARIANT 5: note = Any amino acid
  VARIANT 6: note = Any amino acid
  VARIANT 7: note = Any amino acid
  VARIANT 8: note = Any amino acid
  VARIANT 9: note = Any amino acid
  VARIANT 10: note = Any amino acid
  VARIANT 11: note = Any amino acid
  VARIANT 12: note = Any amino acid
  VARIANT 13: note = Any amino acid
  VARIANT 14: note = Any amino acid
  VARIANT 15: note = Any amino acid
  VARIANT 16: note = Any amino acid
  VARIANT 17: note = Any amino acid
  VARIANT 18: note = Any amino acid
  VARIANT 19: note = Any amino acid
  VARIANT 20: note = Any amino acid
  VARIANT 21: note = Any amino acid
  VARIANT 22: note = Any amino acid
  VARIANT 23: note = Any amino acid
  VARIANT 24: note = Any amino acid
  VARIANT 25: note = Any amino acid
  VARIANT 26: note = Any amino acid
  VARIANT 27: note = Any amino acid
  VARIANT 28: note = Any amino acid
  VARIANT 29: note = Any amino acid
  VARIANT 30: note = Any amino acid
  VARIANT 31: note = Any amino acid
  VARIANT 32: note = Any amino acid
  VARIANT 33: note = Any amino acid
  VARIANT 34: note = Any amino acid
  VARIANT 35: note = Any amino acid
  VARIANT 36: note = Any amino acid
  VARIANT 37: note = Any amino acid
  VARIANT 38: note = Any amino acid
  VARIANT 39: note = Any amino acid
  VARIANT 40: note = Any amino acid
  VARIANT 41: note = Any amino acid
  VARIANT 42: note = Any amino acid
  VARIANT 43: note = Any amino acid
  VARIANT 44: note = Any amino acid
  VARIANT 45: note = Any amino acid
  VARIANT 46: note = Any amino acid
  VARIANT 47: note = Any amino acid
  VARIANT 48: note = Any amino acid
  VARIANT 49: note = Any amino acid
  VARIANT 50: note = Any amino acid
  VARIANT 51: note = Any amino acid
  VARIANT 52: note = Any amino acid
  VARIANT 53: note = Any amino acid
  VARIANT 54: note = Any amino acid
  VARIANT 55: note = Any amino acid
  VARIANT 56: note = Any amino acid
  VARIANT 58: note = Any amino acid
  VARIANT 59: note = Any amino acid
  VARIANT 60: note = Any amino acid
  VARIANT 61: note = Any amino acid
  VARIANT 62: note = Any amino acid
  VARIANT 63: note = Any amino acid
  VARIANT 64: note = Any amino acid
  VARIANT 65: note = Any amino acid
  VARIANT 66: note = Any amino acid
  VARIANT 67: note = Any amino acid
  VARIANT 68: note = Any amino acid
  VARIANT 69: note = Any amino acid
  VARIANT 70: note = Any amino acid
  VARIANT 71: note = Any amino acid
  VARIANT 72: note = Any amino acid
  VARIANT 73: note = Any amino acid
  VARIANT 74: note = Any amino acid
  VARIANT 75: note = Any amino acid
  VARIANT 76: note = Any amino acid
  VARIANT 77: note = Any amino acid
  VARIANT 78: note = Any amino acid
  VARIANT 79: note = Any amino acid
  VARIANT 80: note = Any amino acid
  VARIANT 81: note = Any amino acid
  VARIANT 82: note = Any amino acid
  VARIANT 83: note = Any amino acid
  VARIANT 84: note = Any amino acid
  VARIANT 85: note = Any amino acid
  VARIANT 86: note = Any amino acid
  VARIANT 87: note = Any amino acid
  VARIANT 88: note = Any amino acid
  VARIANT 89: note = Any amino acid
  VARIANT 90: note = Any amino acid
  VARIANT 91: note = Any amino acid
  VARIANT 92: note = Any amino acid
  VARIANT 93: note = Any amino acid
  VARIANT 94: note = Any amino acid
  VARIANT 95: note = Any amino acid
  VARIANT 96: note = Any amino acid
  VARIANT 98: note = Any amino acid
  VARIANT 100: note = Any amino acid
  VARIANT 101: note = Any amino acid
DXXXXXXXXXXXXXXXXXXXXXXXXXXXXXXXXXXXXXXXXXXXXXXXXXXXXXXXEXXXXXXXXXXXXXXXXXXXXXXXXXXXXXXXXXXXXXXXVXDXXM

SEQ ID NO: 795803 - protein, 5 aa, unidentified
  VARIANT 5: note = S or A
GIDVX

SEQ ID NO: 795804 - protein, 5 aa, unidentified
GIDVA

SEQ ID NO: 795805 - protein, 5 aa, unidentified
GVDTH

SEQ ID NO: 795806 - protein, 5 aa, unidentified
GIDIS

SEQ ID NO: 795807 - protein, 5 aa, unidentified
GIDVG

SEQ ID NO: 795808 - protein, 5 aa, unidentified
GIDIG

SEQ ID NO: 795809 - protein, 5 aa, unidentified
GIDIA

SEQ ID NO: 795810 - protein, 5 aa, unidentified
GIDWA

SEQ ID NO: 795811 - protein, 5 aa, unidentified
GVDVS

SEQ ID NO: 795812 - protein, 5 aa, unidentified
GIDVH

SEQ ID NO: 795813 - protein, 5 aa, unidentified
GVDVA

SEQ ID NO: 795814 - protein, 5 aa, unidentified
GVDPH

SEQ ID NO: 795815 - protein, 5 aa, unidentified
GLDWA

SEQ ID NO: 795816 - protein, 5 aa, unidentified
GVDIA

SEQ ID NO: 795817 - protein, 5 aa, unidentified
GIDPH

SEQ ID NO: 795818 - protein, 5 aa, unidentified
GVDVG

SEQ ID NO: 795819 - protein, 5 aa, unidentified
GVDIS

SEQ ID NO: 795820 - protein, 5 aa, unidentified
GVDWA

SEQ ID NO: 795821 - protein, 5 aa, unidentified
GVDVH

SEQ ID NO: 795822 - protein, 5 aa, unidentified
GDDWA

SEQ ID NO: 795823 - protein, 5 aa, unidentified
GIDLA

SEQ ID NO: 795824 - protein, 5 aa, unidentified
GVDIG

SEQ ID NO: 795825 - protein, 5 aa, unidentified
GIDLG

SEQ ID NO: 795826 - protein, 5 aa, unidentified
GIDTH

SEQ ID NO: 795827 - protein, 5 aa, unidentified
GLDVS

SEQ ID NO: 795828 - protein, 5 aa, unidentified
GLDVG

SEQ ID NO: 795829 - protein, 5 aa, unidentified
GIDWS

SEQ ID NO: 795830 - protein, 5 aa, unidentified
GIDWG

SEQ ID NO: 795831 - protein, 5 aa, unidentified
GLDIH

SEQ ID NO: 795832 - protein, 5 aa, unidentified
GLDIG

SEQ ID NO: 795833 - protein, 5 aa, unidentified
AIDVA

SEQ ID NO: 795834 - protein, 5 aa, unidentified
GLDVA

SEQ ID NO: 795835 - protein, 5 aa, unidentified
GVDAH

SEQ ID NO: 795836 - protein, 5 aa, unidentified
GLDWG

SEQ ID NO: 795837 - protein, 5 aa, unidentified
GLDIA

SEQ ID NO: 795838 - protein, 5 aa, unidentified
GIDTS

SEQ ID NO: 795839 - protein, 5 aa, unidentified
GFDWA

SEQ ID NO: 795840 - protein, 5 aa, unidentified
GLDIS

SEQ ID NO: 795841 - protein, 5 aa, unidentified
GIDVC

SEQ ID NO: 795842 - protein, 5 aa, unidentified
GMDVH

SEQ ID NO: 795843 - protein, 5 aa, unidentified
GIDTG

SEQ ID NO: 795844 - protein, 5 aa, unidentified
GIDAG

SEQ ID NO: 795845 - protein, 5 aa, unidentified
GMDPH

SEQ ID NO: 795846 - protein, 5 aa, unidentified
GADTH

SEQ ID NO: 795847 - protein, 5 aa, unidentified
AIDWA

SEQ ID NO: 795848 - protein, 5 aa, unidentified
GIDFS

SEQ ID NO: 795849 - protein, 5 aa, unidentified
GIDAH

SEQ ID NO: 795850 - protein, 5 aa, unidentified
GIDLS

SEQ ID NO: 795851 - protein, 5 aa, unidentified
AIDIA

SEQ ID NO: 795852 - protein, 5 aa, unidentified
ALDIG

SEQ ID NO: 795853 - protein, 5 aa, unidentified
GIDCG

SEQ ID NO: 795854 - protein, 5 aa, unidentified
GVDWG

SEQ ID NO: 795855 - protein, 5 aa, unidentified
GVDSH

SEQ ID NO: 795856 - protein, 5 aa, unidentified
GIDTA

SEQ ID NO: 795857 - protein, 5 aa, unidentified
AVDVG

SEQ ID NO: 795858 - protein, 5 aa, unidentified
GIDIH

SEQ ID NO: 795859 - protein, 5 aa, unidentified
GIDSH

SEQ ID NO: 795860 - protein, 5 aa, unidentified
GADVH

SEQ ID NO: 795861 - protein, 5 aa, unidentified
GCDVS

SEQ ID NO: 795862 - protein, 5 aa, unidentified
AIDVG

SEQ ID NO: 795863 - protein, 5 aa, unidentified
AVDVA

SEQ ID NO: 795864 - protein, 5 aa, unidentified
ALDVH

SEQ ID NO: 795865 - protein, 5 aa, unidentified
GVDTG

SEQ ID NO: 795866 - protein, 5 aa, unidentified
GIDAA

SEQ ID NO: 795867 - protein, 5 aa, unidentified
AIDIG

SEQ ID NO: 795868 - protein, 5 aa, unidentified
GVDLG

SEQ ID NO: 795869 - protein, 5 aa, unidentified
GVDAG

SEQ ID NO: 795870 - protein, 5 aa, unidentified
GCDVG

SEQ ID NO: 795871 - protein, 5 aa, unidentified
GVDLA

SEQ ID NO: 795872 - protein, 5 aa, unidentified
GMDVS

SEQ ID NO: 795873 - protein, 5 aa, unidentified
GIDMA

SEQ ID NO: 795874 - protein, 5 aa, unidentified
GWDWA

SEQ ID NO: 795875 - protein, 5 aa, unidentified
GIDPA

SEQ ID NO: 795876 - protein, 5 aa, unidentified
GIDMS

SEQ ID NO: 795877 - protein, 5 aa, unidentified
GADVS

SEQ ID NO: 795878 - protein, 5 aa, unidentified
GLDRS

SEQ ID NO: 795879 - protein, 5 aa, unidentified
GLDLH

SEQ ID NO: 795880 - protein, 5 aa, unidentified
GVDCH

SEQ ID NO: 795881 - protein, 5 aa, unidentified
GLDLA

SEQ ID NO: 795882 - protein, 5 aa, unidentified
ALDWA

SEQ ID NO: 795883 - protein, 5 aa, unidentified
GADVA

SEQ ID NO: 795884 - protein, 5 aa, unidentified
AVDCA

SEQ ID NO: 795885 - protein, 5 aa, unidentified
GVDVC

SEQ ID NO: 795886 - protein, 5 aa, unidentified
GADLS

SEQ ID NO: 795887 - protein, 5 aa, unidentified
GADIS

SEQ ID NO: 795888 - protein, 5 aa, unidentified
GIDAS

SEQ ID NO: 795889 - protein, 5 aa, unidentified
AIDVS

SEQ ID NO: 795890 - protein, 5 aa, unidentified
GADIA

SEQ ID NO: 795891 - protein, 5 aa, unidentified
GIDPD

SEQ ID NO: 795892 - protein, 5 aa, unidentified
GLDLG

SEQ ID NO: 795893 - protein, 5 aa, unidentified
GTDVS

SEQ ID NO: 795894 - protein, 5 aa, unidentified
GVDLH

SEQ ID NO: 795895 - protein, 5 aa, unidentified
GVDMA

SEQ ID NO: 795896 - protein, 5 aa, unidentified
GMDIS

SEQ ID NO: 795897 - protein, 5 aa, unidentified
GHDWA

SEQ ID NO: 795898 - protein, 5 aa, unidentified
GMDVA

SEQ ID NO: 795899 - protein, 5 aa, unidentified
GADIH

SEQ ID NO: 795900 - protein, 5 aa, unidentified
GFDVG

SEQ ID NO: 795901 - protein, 5 aa, unidentified
GIEVS

SEQ ID NO: 795902 - protein, 5 aa, unidentified
GFDVS

SEQ ID NO: 795903 - protein, 5 aa, unidentified
GMDIG

SEQ ID NO: 795904 - protein, 5 aa, unidentified
AIDVH

SEQ ID NO: 795905 - protein, 5 aa, unidentified
AVDIG

SEQ ID NO: 795906 - protein, 5 aa, unidentified
GCDIG

SEQ ID NO: 795907 - protein, 5 aa, unidentified
GCDIS

SEQ ID NO: 795908 - protein, 5 aa, unidentified
SVDCA

SEQ ID NO: 795909 - protein, 5 aa, unidentified
GIDCS

SEQ ID NO: 795910 - protein, 5 aa, unidentified
ALDVS

SEQ ID NO: 795911 - protein, 5 aa, unidentified
GMDIH

SEQ ID NO: 795912 - protein, 5 aa, unidentified
AVDPH

SEQ ID NO: 795913 - protein, 5 aa, unidentified
GIDVD

SEQ ID NO: 795914 - protein, 5 aa, unidentified
GVDLS

SEQ ID NO: 795915 - protein, 5 aa, unidentified
GIDCH

SEQ ID NO: 795916 - protein, 5 aa, unidentified
GGDVS

SEQ ID NO: 795917 - protein, 5 aa, unidentified
GLDWS

SEQ ID NO: 795918 - protein, 5 aa, unidentified
ALDWG

SEQ ID NO: 795919 - protein, 5 aa, unidentified
GADIG

SEQ ID NO: 795920 - protein, 5 aa, unidentified
GCDVA

SEQ ID NO: 795921 - protein, 5 aa, unidentified
GNDWA

SEQ ID NO: 795922 - protein, 5 aa, unidentified
GTDTH

SEQ ID NO: 795923 - protein, 5 aa, unidentified
AIDIS

SEQ ID NO: 795924 - protein, 5 aa, unidentified
  VARIANT 3: note = A or S
MEXTG

SEQ ID NO: 795925 - protein, 5 aa, unidentified
MESTG

SEQ ID NO: 795926 - protein, 5 aa, unidentified
LEATG

SEQ ID NO: 795927 - protein, 5 aa, unidentified
LESTG

SEQ ID NO: 795928 - protein, 5 aa, unidentified
VEGTG

SEQ ID NO: 795929 - protein, 5 aa, unidentified
VEATG

SEQ ID NO: 795930 - protein, 5 aa, unidentified
IEATG

SEQ ID NO: 795931 - protein, 5 aa, unidentified
FEATG

SEQ ID NO: 795932 - protein, 5 aa, unidentified
MEPTG

SEQ ID NO: 795933 - protein, 5 aa, unidentified
MEHTG

SEQ ID NO: 795934 - protein, 5 aa, unidentified
CEATG

SEQ ID NO: 795935 - protein, 5 aa, unidentified
MESTA

SEQ ID NO: 795936 - protein, 5 aa, unidentified
IEGTG

SEQ ID NO: 795937 - protein, 5 aa, unidentified
LEASG

SEQ ID NO: 795938 - protein, 5 aa, unidentified
LEPTG

SEQ ID NO: 795939 - protein, 5 aa, unidentified
VESTG

SEQ ID NO: 795940 - protein, 5 aa, unidentified
MEASG

SEQ ID NO: 795941 - protein, 5 aa, unidentified
MESTS

SEQ ID NO: 795942 - protein, 5 aa, unidentified
VGIET

SEQ ID NO: 795943 - protein, 5 aa, unidentified
MEATS

SEQ ID NO: 795944 - protein, 5 aa, unidentified
FESTG

SEQ ID NO: 795945 - protein, 5 aa, unidentified
IESTG

SEQ ID NO: 795946 - protein, 5 aa, unidentified
FEPTG

SEQ ID NO: 795947 - protein, 5 aa, unidentified
VAIET

SEQ ID NO: 795948 - protein, 5 aa, unidentified
CEPTG

SEQ ID NO: 795949 - protein, 5 aa, unidentified
IEDCR

SEQ ID NO: 795950 - protein, 5 aa, unidentified
IERPD

SEQ ID NO: 795951 - protein, 5 aa, unidentified
LESTS

SEQ ID NO: 795952 - protein, 5 aa, unidentified
IEASG

SEQ ID NO: 795953 - protein, 5 aa, unidentified
FEHTG

SEQ ID NO: 795954 - protein, 5 aa, unidentified
LEDCR

SEQ ID NO: 795955 - protein, 5 aa, unidentified
LEATS

SEQ ID NO: 795956 - protein, 5 aa, unidentified
LEHTG

SEQ ID NO: 795957 - protein, 5 aa, unidentified
MESSG

SEQ ID NO: 795958 - protein, 5 aa, unidentified
MEYTG

SEQ ID NO: 795959 - protein, 5 aa, unidentified
VEDCR

SEQ ID NO: 795960 - protein, 5 aa, unidentified
IGIET

SEQ ID NO: 795961 - protein, 5 aa, unidentified
VCLEQ

SEQ ID NO: 795962 - protein, 5 aa, unidentified
VAIER

SEQ ID NO: 795963 - protein, 5 aa, unidentified
MQSTG

SEQ ID NO: 795964 - protein, 5 aa, unidentified
VEPTG

SEQ ID NO: 795965 - protein, 5 aa, unidentified
MENTG

SEQ ID NO: 795966 - protein, 5 aa, unidentified
VEGAG

SEQ ID NO: 795967 - protein, 5 aa, unidentified
VALEQ

SEQ ID NO: 795968 - protein, 5 aa, unidentified
VDQPA

SEQ ID NO: 795969 - protein, 5 aa, unidentified
IEPTG

SEQ ID NO: 795970 - protein, 5 aa, unidentified
FENTG

SEQ ID NO: 795971 - protein, 5 aa, unidentified
VEASG

SEQ ID NO: 795972 - protein, 5 aa, unidentified
YEPTG

SEQ ID NO: 795973 - protein, 5 aa, unidentified
MEPSG

SEQ ID NO: 795974 - protein, 5 aa, unidentified
VEGTS

SEQ ID NO: 795975 - protein, 5 aa, unidentified
CEASG

SEQ ID NO: 795976 - protein, 5 aa, unidentified
IEGAG

SEQ ID NO: 795977 - protein, 5 aa, unidentified
IENTG

SEQ ID NO: 795978 - protein, 5 aa, unidentified
MEGTG

SEQ ID NO: 795979 - protein, 5 aa, unidentified
LESTA

SEQ ID NO: 795980 - protein, 5 aa, unidentified
VAIEV

SEQ ID NO: 795981 - protein, 5 aa, unidentified
CESTG

SEQ ID NO: 795982 - protein, 5 aa, unidentified
MEATN

SEQ ID NO: 795983 - protein, 5 aa, unidentified
IAIER

SEQ ID NO: 795984 - protein, 5 aa, unidentified
LEPTA

SEQ ID NO: 795985 - protein, 5 aa, unidentified
MECTG

SEQ ID NO: 795986 - protein, 5 aa, unidentified
AEHTG

SEQ ID NO: 795987 - protein, 5 aa, unidentified
LEGTG

SEQ ID NO: 795988 - protein, 5 aa, unidentified
FEASG

SEQ ID NO: 795989 - protein, 5 aa, unidentified
IEGSG

SEQ ID NO: 795990 - protein, 5 aa, unidentified
MEGYN

SEQ ID NO: 795991 - protein, 5 aa, unidentified
AEATG

SEQ ID NO: 795992 - protein, 5 aa, unidentified
LEPSG

SEQ ID NO: 795993 - protein, 5 aa, unidentified
YEATG

SEQ ID NO: 795994 - protein, 5 aa, unidentified
VEAAG

SEQ ID NO: 795995 - protein, 5 aa, unidentified
VESTS

SEQ ID NO: 795996 - protein, 5 aa, unidentified
IERTG

SEQ ID NO: 795997 - protein, 5 aa, unidentified
MEPTR

SEQ ID NO: 795998 - protein, 5 aa, unidentified
IEGTS

SEQ ID NO: 795999 - protein, 5 aa, unidentified
VECTG

SEQ ID NO: 796000 - protein, 5 aa, unidentified
YESTG

SEQ ID NO: 796001 - protein, 5 aa, unidentified
MEATA

SEQ ID NO: 796002 - protein, 5 aa, unidentified
VERTG

SEQ ID NO: 796003 - protein, 5 aa, unidentified
METTG

SEQ ID NO: 796004 - protein, 5 aa, unidentified
LEDTG

SEQ ID NO: 796005 - protein, 5 aa, unidentified
LCLEQ

SEQ ID NO: 796006 - protein, 5 aa, unidentified
MEDTG

SEQ ID NO: 796007 - protein, 5 aa, unidentified
VEGAN

SEQ ID NO: 796008 - protein, 5 aa, unidentified
MEPTN

SEQ ID NO: 796009 - protein, 5 aa, unidentified
VAVEQ

SEQ ID NO: 796010 - protein, 5 aa, unidentified
IALEQ

SEQ ID NO: 796011 - protein, 5 aa, unidentified
IERGD

SEQ ID NO: 796012 - protein, 5 aa, unidentified
VEGCN

SEQ ID NO: 796013 - protein, 5 aa, unidentified
IAIET

SEQ ID NO: 796014 - protein, 5 aa, unidentified
IESAG

SEQ ID NO: 796015 - protein, 5 aa, unidentified
IEGAA

SEQ ID NO: 796016 - protein, 5 aa, unidentified
MEPTS

SEQ ID NO: 796017 - protein, 5 aa, unidentified
MEFTG

SEQ ID NO: 796018 - protein, 5 aa, unidentified
AEPTG

SEQ ID NO: 796019 - protein, 5 aa, unidentified
ICLEQ

SEQ ID NO: 796020 - protein, 5 aa, unidentified
AEYTG

SEQ ID NO: 796021 - protein, 5 aa, unidentified
IDAAG

SEQ ID NO: 796022 - protein, 5 aa, unidentified
VCLEL

SEQ ID NO: 796023 - protein, 5 aa, unidentified
CEPSG

SEQ ID NO: 796024 - protein, 5 aa, unidentified
MEPTA

SEQ ID NO: 796025 - protein, 5 aa, unidentified
LENTG

SEQ ID NO: 796026 - protein, 5 aa, unidentified
LESSG

SEQ ID NO: 796027 - protein, 5 aa, unidentified
IERPS

SEQ ID NO: 796028 - protein, 5 aa, unidentified
FEATS

SEQ ID NO: 796029 - protein, 5 aa, unidentified
IESTS

SEQ ID NO: 796030 - protein, 5 aa, unidentified
LETTG

SEQ ID NO: 796031 - protein, 5 aa, unidentified
VEMTG

SEQ ID NO: 796032 - protein, 5 aa, unidentified
LEATN

SEQ ID NO: 796033 - protein, 5 aa, unidentified
VEATN

SEQ ID NO: 796034 - protein, 5 aa, unidentified
CENTG

SEQ ID NO: 796035 - protein, 5 aa, unidentified
IEGAW

SEQ ID NO: 796036 - protein, 5 aa, unidentified
IEPTS

SEQ ID NO: 796037 - protein, 5 aa, unidentified
LEYTG

SEQ ID NO: 796038 - protein, 5 aa, unidentified
VEGCG

SEQ ID NO: 796039 - protein, 5 aa, unidentified
LEPTS

SEQ ID NO: 796040 - protein, 5 aa, unidentified
VAIEQ

SEQ ID NO: 796041 - protein, 5 aa, unidentified
VDQPN

SEQ ID NO: 796042 - protein, 5 aa, unidentified
VDQPG

SEQ ID NO: 796043 - protein, 5 aa, unidentified
GEHTG

SEQ ID NO: 796044 - protein, 5 aa, unidentified
MEVTG

SEQ ID NO: 796045 - protein, 5 aa, unidentified
VEGSG

SEQ ID NO: 796046 - protein, 5 aa, unidentified
IEGTR

SEQ ID NO: 796047 - protein, 5 aa, unidentified
VEGAA

SEQ ID NO: 796048 - protein, 5 aa, unidentified
AVAIE

SEQ ID NO: 796049 - protein, 5 aa, unidentified
VEGTR

SEQ ID NO: 796050 - protein, 5 aa, unidentified
VEGAS

SEQ ID NO: 796051 - protein, 5 aa, unidentified
GEDCG

SEQ ID NO: 796052 - protein, 5 aa, unidentified
IEAAG

SEQ ID NO: 796053 - protein, 5 aa, unidentified
IEATS

SEQ ID NO: 796054 - protein, 5 aa, unidentified
LEATA

SEQ ID NO: 796055 - protein, 5 aa, unidentified
IETGG

SEQ ID NO: 796056 - protein, 5 aa, unidentified
VESTA

SEQ ID NO: 796057 - protein, 5 aa, unidentified
FEDTG

SEQ ID NO: 796058 - protein, 5 aa, unidentified
GEATG

SEQ ID NO: 796059 - protein, 5 aa, unidentified
IEGCN

SEQ ID NO: 796060 - protein, 5 aa, unidentified
CETTG

SEQ ID NO: 796061 - protein, 5 aa, unidentified
VEGAT

SEQ ID NO: 796062 - protein, 5 aa, unidentified
AESTG

SEQ ID NO: 796063 - protein, 5 aa, unidentified
IEGAS

SEQ ID NO: 796064 - protein, 5 aa, unidentified
IDQPG

SEQ ID NO: 796065 - protein, 5 aa, unidentified
IAIEQ

SEQ ID NO: 796066 - protein, 5 aa, unidentified
IETSQ

SEQ ID NO: 796067 - protein, 5 aa, unidentified
ACIVE

SEQ ID NO: 796068 - protein, 5 aa, unidentified
MQATG

SEQ ID NO: 796069 - protein, 5 aa, unidentified
VEGSN

SEQ ID NO: 796070 - protein, 5 aa, unidentified
VENTG

SEQ ID NO: 796071 - protein, 5 aa, unidentified
VGIER

SEQ ID NO: 796072 - protein, 5 aa, unidentified
ICLEL

SEQ ID NO: 796073 - protein, 5 aa, unidentified
CESSG

SEQ ID NO: 796074 - protein, 5 aa, unidentified
LEDVG

SEQ ID NO: 796075 - protein, 5 aa, unidentified
LEGSG

SEQ ID NO: 796076 - protein, 5 aa, unidentified
FEPTS

SEQ ID NO: 796077 - protein, 5 aa, unidentified
FESTA

SEQ ID NO: 796078 - protein, 5 aa, unidentified
CESTS

SEQ ID NO: 796079 - protein, 5 aa, unidentified
LEDVS

SEQ ID NO: 796080 - protein, 5 aa, unidentified
IEGSA

SEQ ID NO: 796081 - protein, 5 aa, unidentified
LEAIG

SEQ ID NO: 796082 - protein, 5 aa, unidentified
LEDVN

SEQ ID NO: 796083 - protein, 5 aa, unidentified
VACEL

SEQ ID NO: 796084 - protein, 5 aa, unidentified
IETDR

SEQ ID NO: 796085 - protein, 5 aa, unidentified
VEGAR

SEQ ID NO: 796086 - protein, 5 aa, unidentified
VEPTA

SEQ ID NO: 796087 - protein, 5 aa, unidentified
AAIEK

SEQ ID NO: 796088 - protein, 5 aa, unidentified
FEPTA

SEQ ID NO: 796089 - protein, 5 aa, unidentified
VEGTA

SEQ ID NO: 796090 - protein, 5 aa, unidentified
TEATG

SEQ ID NO: 796091 - protein, 5 aa, unidentified
LEQTG

SEQ ID NO: 796092 - protein, 5 aa, unidentified
LQSTG

SEQ ID NO: 796093 - protein, 5 aa, unidentified
VALEL

SEQ ID NO: 796094 - protein, 5 aa, unidentified
VESAG

SEQ ID NO: 796095 - protein, 5 aa, unidentified
IEGSN

SEQ ID NO: 796096 - protein, 5 aa, unidentified
IEGTA

SEQ ID NO: 796097 - protein, 5 aa, unidentified
IETNQ

SEQ ID NO: 796098 - protein, 5 aa, unidentified
VESSG

SEQ ID NO: 796099 - protein, 5 aa, unidentified
CEHTG

SEQ ID NO: 796100 - protein, 5 aa, unidentified
MEGFN

SEQ ID NO: 796101 - protein, 5 aa, unidentified
MESAG

SEQ ID NO: 796102 - protein, 5 aa, unidentified
VEGSA

SEQ ID NO: 796103 - protein, 5 aa, unidentified
LAIEA

SEQ ID NO: 796104 - protein, 5 aa, unidentified
VAVET

SEQ ID NO: 796105 - protein, 5 aa, unidentified
GENTG

SEQ ID NO: 796106 - protein, 5 aa, unidentified
LEGTR

SEQ ID NO: 796107 - protein, 5 aa, unidentified
LEVTG

SEQ ID NO: 796108 - protein, 5 aa, unidentified
VALET

SEQ ID NO: 796109 - protein, 5 aa, unidentified
WEATG

SEQ ID NO: 796110 - protein, 5 aa, unidentified
VEATS

SEQ ID NO: 796111 - protein, 5 aa, unidentified
VGLEQ

SEQ ID NO: 796112 - protein, 5 aa, unidentified
WAAIE

SEQ ID NO: 796113 - protein, 5 aa, unidentified
MEQTG

SEQ ID NO: 796114 - protein, 5 aa, unidentified
SEATA

SEQ ID NO: 796115 - protein, 5 aa, unidentified
ACIIE

SEQ ID NO: 796116 - protein, 5 aa, unidentified
IEGIG

SEQ ID NO: 796117 - protein, 5 aa, unidentified
IEHTG

SEQ ID NO: 796118 - protein, 5 aa, unidentified
IEATN

SEQ ID NO: 796119 - protein, 5 aa, unidentified
IECTG

SEQ ID NO: 796120 - protein, 5 aa, unidentified
LEGKN

SEQ ID NO: 796121 - protein, 5 aa, unidentified
FEYTG

SEQ ID NO: 796122 - protein, 5 aa, unidentified
IEFAG

SEQ ID NO: 796123 - protein, 5 aa, unidentified
VEPTS

SEQ ID NO: 796124 - protein, 5 aa, unidentified
VVLEQ

SEQ ID NO: 796125 - protein, 5 aa, unidentified
FESSG

SEQ ID NO: 796126 - protein, 5 aa, unidentified
IAVEQ

SEQ ID NO: 796127 - protein, 5 aa, unidentified
VDIIG

SEQ ID NO: 796128 - protein, 5 aa, unidentified
VEGTN

SEQ ID NO: 796129 - protein, 5 aa, unidentified
AENTG

SEQ ID NO: 796130 - protein, 5 aa, unidentified
MESTY

SEQ ID NO: 796131 - protein, 5 aa, unidentified
VDISG

SEQ ID NO: 796132 - protein, 5 aa, unidentified
VEDGR

SEQ ID NO: 796133 - protein, 5 aa, unidentified
IETTG

SEQ ID NO: 796134 - protein, 5 aa, unidentified
IEGCQ

SEQ ID NO: 796135 - protein, 5 aa, unidentified
LALEQ

SEQ ID NO: 796136 - protein, 5 aa, unidentified
LEDVH

SEQ ID NO: 796137 - protein, 5 aa, unidentified
LESIG

SEQ ID NO: 796138 - protein, 5 aa, unidentified
VEDVR

SEQ ID NO: 796139 - protein, 5 aa, unidentified
AEPTS

SEQ ID NO: 796140 - protein, 5 aa, unidentified
IESSG

SEQ ID NO: 796141 - protein, 5 aa, unidentified
TEATS

SEQ ID NO: 796142 - protein, 5 aa, unidentified
VGIEV

SEQ ID NO: 796143 - protein, 5 aa, unidentified
IDLAD

SEQ ID NO: 796144 - protein, 5 aa, unidentified
LELSK

SEQ ID NO: 796145 - protein, 5 aa, unidentified
SEATG

SEQ ID NO: 796146 - protein, 5 aa, unidentified
VENAG

SEQ ID NO: 796147 - protein, 5 aa, unidentified
IEGAR

SEQ ID NO: 796148 - protein, 5 aa, unidentified
IEGAT

SEQ ID NO: 796149 - protein, 5 aa, unidentified
IEQTG

SEQ ID NO: 796150 - protein, 5 aa, unidentified
MEETG

SEQ ID NO: 796151 - protein, 5 aa, unidentified
IAIEV

SEQ ID NO: 796152 - protein, 5 aa, unidentified
IEDVR

SEQ ID NO: 796153 - protein, 5 aa, unidentified
IERSD

SEQ ID NO: 796154 - protein, 5 aa, unidentified
LEGAG

SEQ ID NO: 796155 - protein, 5 aa, unidentified
LENAY

SEQ ID NO: 796156 - protein, 5 aa, unidentified
MASTG

SEQ ID NO: 796157 - protein, 5 aa, unidentified
VGIEK

SEQ ID NO: 796158 - protein, 5 aa, unidentified
IEGVG

SEQ ID NO: 796159 - protein, 5 aa, unidentified
LDVVG

SEQ ID NO: 796160 - protein, 5 aa, unidentified
VESKR

SEQ ID NO: 796161 - protein, 5 aa, unidentified
IESAN

SEQ ID NO: 796162 - protein, 5 aa, unidentified
LDAAG

SEQ ID NO: 796163 - protein, 5 aa, unidentified
LEDCH

SEQ ID NO: 796164 - protein, 5 aa, unidentified
FESTS

SEQ ID NO: 796165 - protein, 5 aa, unidentified
IDVLG

SEQ ID NO: 796166 - protein, 5 aa, unidentified
VDLTT

SEQ ID NO: 796167 - protein, 5 aa, unidentified
VEGAH

SEQ ID NO: 796168 - protein, 5 aa, unidentified
VGIEI

SEQ ID NO: 796169 - protein, 5 aa, unidentified
GEDTG

SEQ ID NO: 796170 - protein, 5 aa, unidentified
IETSS

SEQ ID NO: 796171 - protein, 5 aa, unidentified
LEDTS

SEQ ID NO: 796172 - protein, 5 aa, unidentified
LEFAG

SEQ ID NO: 796173 - protein, 5 aa, unidentified
LEFTG

SEQ ID NO: 796174 - protein, 5 aa, unidentified
VAIES

SEQ ID NO: 796175 - protein, 5 aa, unidentified
IEPSG

SEQ ID NO: 796176 - protein, 5 aa, unidentified
LEPTR

SEQ ID NO: 796177 - protein, 5 aa, unidentified
IEGAY

SEQ ID NO: 796178 - protein, 5 aa, unidentified
IERPE

SEQ ID NO: 796179 - protein, 6 aa, unidentified
  VARIANT 5: note = Any amino acid
VDHTXG

SEQ ID NO: 796180 - protein, 5 aa, unidentified
VENAR

SEQ ID NO: 796181 - protein, 5 aa, unidentified
VESAN

SEQ ID NO: 796182 - protein, 5 aa, unidentified
VGLET

SEQ ID NO: 796183 - protein, 5 aa, unidentified
IDLTS

SEQ ID NO: 796184 - protein, 5 aa, unidentified
IEDGR

SEQ ID NO: 796185 - protein, 5 aa, unidentified
IESTA

SEQ ID NO: 796186 - protein, 5 aa, unidentified
LERTG

SEQ ID NO: 796187 - protein, 5 aa, unidentified
VAIEI

SEQ ID NO: 796188 - protein, 5 aa, unidentified
VCIET

SEQ ID NO: 796189 - protein, 5 aa, unidentified
VEGSS

SEQ ID NO: 796190 - protein, 5 aa, unidentified
  VARIANT 2: note = R or P
DXIDA

SEQ ID NO: 796191 - protein, 5 aa, unidentified
  VARIANT 2: note = R, P, or A
DXIDA

SEQ ID NO: 796192 - protein, 5 aa, unidentified
DPIDA

SEQ ID NO: 796193 - protein, 5 aa, unidentified
DAIDA

SEQ ID NO: 796194 - protein, 5 aa, unidentified
DRLDA

SEQ ID NO: 796195 - protein, 5 aa, unidentified
DKIDA

SEQ ID NO: 796196 - protein, 5 aa, unidentified
DALDA

SEQ ID NO: 796197 - protein, 5 aa, unidentified
DVKDA

SEQ ID NO: 796198 - protein, 5 aa, unidentified
DKLDA

SEQ ID NO: 796199 - protein, 5 aa, unidentified
DKVDA

SEQ ID NO: 796200 - protein, 5 aa, unidentified
DPLDA

SEQ ID NO: 796201 - protein, 5 aa, unidentified
DKKDA

SEQ ID NO: 796202 - protein, 5 aa, unidentified
DRVDA

SEQ ID NO: 796203 - protein, 5 aa, unidentified
DKADA

SEQ ID NO: 796204 - protein, 5 aa, unidentified
DPGDA

SEQ ID NO: 796205 - protein, 5 aa, unidentified
DVLDC

SEQ ID NO: 796206 - protein, 5 aa, unidentified
DPTDA

SEQ ID NO: 796207 - protein, 5 aa, unidentified
DAVDA

SEQ ID NO: 796208 - protein, 5 aa, unidentified
DPVDA

SEQ ID NO: 796209 - protein, 5 aa, unidentified
DPKDA

SEQ ID NO: 796210 - protein, 5 aa, unidentified
DVNDA

SEQ ID NO: 796211 - protein, 5 aa, unidentified
DVKDC

SEQ ID NO: 796212 - protein, 5 aa, unidentified
DAKDA

SEQ ID NO: 796213 - protein, 5 aa, unidentified
DTIDA

SEQ ID NO: 796214 - protein, 5 aa, unidentified
DSIDA

SEQ ID NO: 796215 - protein, 5 aa, unidentified
DVSDA

SEQ ID NO: 796216 - protein, 5 aa, unidentified
DPADA

SEQ ID NO: 796217 - protein, 5 aa, unidentified
DARDA

SEQ ID NO: 796218 - protein, 5 aa, unidentified
DKKDS

SEQ ID NO: 796219 - protein, 5 aa, unidentified
DKIDS

SEQ ID NO: 796220 - protein, 5 aa, unidentified
DVKDS

SEQ ID NO: 796221 - protein, 5 aa, unidentified
DPNDA

SEQ ID NO: 796222 - protein, 5 aa, unidentified
DKSDA

SEQ ID NO: 796223 - protein, 5 aa, unidentified
DRFDA

SEQ ID NO: 796224 - protein, 5 aa, unidentified
DRKDA

SEQ ID NO: 796225 - protein, 5 aa, unidentified
DQIDA

SEQ ID NO: 796226 - protein, 5 aa, unidentified
DAGDA

SEQ ID NO: 796227 - protein, 5 aa, unidentified
DVQDC

SEQ ID NO: 796228 - protein, 5 aa, unidentified
DTLDA

SEQ ID NO: 796229 - protein, 5 aa, unidentified
DAADA

SEQ ID NO: 796230 - protein, 5 aa, unidentified
DRADA

SEQ ID NO: 796231 - protein, 5 aa, unidentified
DKVDS

SEQ ID NO: 796232 - protein, 5 aa, unidentified
DPSDA

SEQ ID NO: 796233 - protein, 5 aa, unidentified
DSLDA

SEQ ID NO: 796234 - protein, 5 aa, unidentified
DKADS

SEQ ID NO: 796235 - protein, 5 aa, unidentified
DRKDP

SEQ ID NO: 796236 - protein, 5 aa, unidentified
DVIDA

SEQ ID NO: 796237 - protein, 5 aa, unidentified
DPRDA

SEQ ID NO: 796238 - protein, 5 aa, unidentified
DQLDA

SEQ ID NO: 796239 - protein, 5 aa, unidentified
DEIDA

SEQ ID NO: 796240 - protein, 5 aa, unidentified
DVLDA

SEQ ID NO: 796241 - protein, 5 aa, unidentified
DATDA

SEQ ID NO: 796242 - protein, 5 aa, unidentified
DVSDC

SEQ ID NO: 796243 - protein, 5 aa, unidentified
DFRDA

SEQ ID NO: 796244 - protein, 5 aa, unidentified
DQVDA

SEQ ID NO: 796245 - protein, 5 aa, unidentified
DKRDA

SEQ ID NO: 796246 - protein, 5 aa, unidentified
DKTDA

SEQ ID NO: 796247 - protein, 5 aa, unidentified
DTKDA

SEQ ID NO: 796248 - protein, 5 aa, unidentified
DVADA

SEQ ID NO: 796249 - protein, 5 aa, unidentified
DRTDA

SEQ ID NO: 796250 - protein, 5 aa, unidentified
DSRDA

SEQ ID NO: 796251 - protein, 5 aa, unidentified
DGKDA

SEQ ID NO: 796252 - protein, 5 aa, unidentified
DKLDS

SEQ ID NO: 796253 - protein, 5 aa, unidentified
DRLDS

SEQ ID NO: 796254 - protein, 5 aa, unidentified
DVRDC

SEQ ID NO: 796255 - protein, 5 aa, unidentified
DELDA

SEQ ID NO: 796256 - protein, 5 aa, unidentified
DSVDA

SEQ ID NO: 796257 - protein, 5 aa, unidentified
DTVDA

SEQ ID NO: 796258 - protein, 5 aa, unidentified
DKTAS

SEQ ID NO: 796259 - protein, 5 aa, unidentified
DRSDA

SEQ ID NO: 796260 - protein, 5 aa, unidentified
DASDA

SEQ ID NO: 796261 - protein, 5 aa, unidentified
DRGDA

SEQ ID NO: 796262 - protein, 5 aa, unidentified
DGIDA

SEQ ID NO: 796263 - protein, 5 aa, unidentified
DIKDA

SEQ ID NO: 796264 - protein, 5 aa, unidentified
DVRDA

SEQ ID NO: 796265 - protein, 5 aa, unidentified
DDIDA

SEQ ID NO: 796266 - protein, 5 aa, unidentified
DLIDA

SEQ ID NO: 796267 - protein, 5 aa, unidentified
DVQEC

SEQ ID NO: 796268 - protein, 5 aa, unidentified
DTKDS

SEQ ID NO: 796269 - protein, 5 aa, unidentified
DRIDS

SEQ ID NO: 796270 - protein, 5 aa, unidentified
DKQDA

SEQ ID NO: 796271 - protein, 5 aa, unidentified
DDTDL

SEQ ID NO: 796272 - protein, 5 aa, unidentified
DDLDA

SEQ ID NO: 796273 - protein, 5 aa, unidentified
DHLDA

SEQ ID NO: 796274 - protein, 5 aa, unidentified
DKSDS

SEQ ID NO: 796275 - protein, 5 aa, unidentified
DVQES

SEQ ID NO: 796276 - protein, 5 aa, unidentified
DKISA

SEQ ID NO: 796277 - protein, 5 aa, unidentified
DPQDA

SEQ ID NO: 796278 - protein, 5 aa, unidentified
DFPDA

SEQ ID NO: 796279 - protein, 5 aa, unidentified
DVGDA

SEQ ID NO: 796280 - protein, 5 aa, unidentified
DVADC

SEQ ID NO: 796281 - protein, 5 aa, unidentified
DFADA

SEQ ID NO: 796282 - protein, 5 aa, unidentified
DRQDA

SEQ ID NO: 796283 - protein, 5 aa, unidentified
DLLDA

SEQ ID NO: 796284 - protein, 5 aa, unidentified
DVQDA

SEQ ID NO: 796285 - protein, 5 aa, unidentified
DGLDA

SEQ ID NO: 796286 - protein, 5 aa, unidentified
DKKDP

SEQ ID NO: 796287 - protein, 5 aa, unidentified
DEVDA

SEQ ID NO: 796288 - protein, 5 aa, unidentified
DDKDA

SEQ ID NO: 796289 - protein, 5 aa, unidentified
DQADA

SEQ ID NO: 796290 - protein, 5 aa, unidentified
DVVDA

SEQ ID NO: 796291 - protein, 5 aa, unidentified
DESDA

SEQ ID NO: 796292 - protein, 5 aa, unidentified
DSADA

SEQ ID NO: 796293 - protein, 5 aa, unidentified
DAKAA

SEQ ID NO: 796294 - protein, 5 aa, unidentified
DERDA

SEQ ID NO: 796295 - protein, 5 aa, unidentified
DMNDA

SEQ ID NO: 796296 - protein, 5 aa, unidentified
DTADA

SEQ ID NO: 796297 - protein, 5 aa, unidentified
DAHDA

SEQ ID NO: 796298 - protein, 5 aa, unidentified
DGVDA

SEQ ID NO: 796299 - protein, 5 aa, unidentified
DALDS

SEQ ID NO: 796300 - protein, 5 aa, unidentified
DPVDS

SEQ ID NO: 796301 - protein, 5 aa, unidentified
DDTDA

SEQ ID NO: 796302 - protein, 5 aa, unidentified
DPDDA

SEQ ID NO: 796303 - protein, 5 aa, unidentified
DVTDA

SEQ ID NO: 796304 - protein, 5 aa, unidentified
DQKDA

SEQ ID NO: 796305 - protein, 5 aa, unidentified
DVSDS

SEQ ID NO: 796306 - protein, 5 aa, unidentified
DHADA

SEQ ID NO: 796307 - protein, 5 aa, unidentified
DLADA

SEQ ID NO: 796308 - protein, 5 aa, unidentified
DRLDC

SEQ ID NO: 796309 - protein, 5 aa, unidentified
DLSDA

SEQ ID NO: 796310 - protein, 5 aa, unidentified
NGIDA

SEQ ID NO: 796311 - protein, 5 aa, unidentified
DDRDC

SEQ ID NO: 796312 - protein, 5 aa, unidentified
DHIDA

SEQ ID NO: 796313 - protein, 5 aa, unidentified
DSFDA

SEQ ID NO: 796314 - protein, 5 aa, unidentified
DKGDA

SEQ ID NO: 796315 - protein, 5 aa, unidentified
DILDC

SEQ ID NO: 796316 - protein, 5 aa, unidentified
DSKDS

SEQ ID NO: 796317 - protein, 5 aa, unidentified
DNIDA

SEQ ID NO: 796318 - protein, 5 aa, unidentified
DQSDA

SEQ ID NO: 796319 - protein, 5 aa, unidentified
DVADS

SEQ ID NO: 796320 - protein, 5 aa, unidentified
DAKDS

SEQ ID NO: 796321 - protein, 5 aa, unidentified
DFKDA

SEQ ID NO: 796322 - protein, 5 aa, unidentified
DIIDA

SEQ ID NO: 796323 - protein, 5 aa, unidentified
DAEDA

SEQ ID NO: 796324 - protein, 5 aa, unidentified
DKVDT

SEQ ID NO: 796325 - protein, 5 aa, unidentified
DPFDA

SEQ ID NO: 796326 - protein, 5 aa, unidentified
DVIDS

SEQ ID NO: 796327 - protein, 5 aa, unidentified
DAVDS

SEQ ID NO: 796328 - protein, 5 aa, unidentified
DIKDC

SEQ ID NO: 796329 - protein, 5 aa, unidentified
DRMDA

SEQ ID NO: 796330 - protein, 5 aa, unidentified
DKMDA

SEQ ID NO: 796331 - protein, 5 aa, unidentified
DMKDA

SEQ ID NO: 796332 - protein, 5 aa, unidentified
DAFDA

SEQ ID NO: 796333 - protein, 5 aa, unidentified
DYRDA

SEQ ID NO: 796334 - protein, 5 aa, unidentified
DEKDA

SEQ ID NO: 796335 - protein, 5 aa, unidentified
DRHDA

SEQ ID NO: 796336 - protein, 5 aa, unidentified
DLVDA

SEQ ID NO: 796337 - protein, 5 aa, unidentified
DNIDS

SEQ ID NO: 796338 - protein, 5 aa, unidentified
DPEDA

SEQ ID NO: 796339 - protein, 5 aa, unidentified
DQKDP

SEQ ID NO: 796340 - protein, 5 aa, unidentified
DAIDL

SEQ ID NO: 796341 - protein, 5 aa, unidentified
DVRDS

SEQ ID NO: 796342 - protein, 5 aa, unidentified
DPGDS

SEQ ID NO: 796343 - protein, 5 aa, unidentified
DPIDS

SEQ ID NO: 796344 - protein, 5 aa, unidentified
DQRDA

SEQ ID NO: 796345 - protein, 5 aa, unidentified
DRKDS

SEQ ID NO: 796346 - protein, 5 aa, unidentified
DDRDA

SEQ ID NO: 796347 - protein, 5 aa, unidentified
DIKDS

SEQ ID NO: 796348 - protein, 5 aa, unidentified
DKNDA

SEQ ID NO: 796349 - protein, 5 aa, unidentified
DKTDS

SEQ ID NO: 796350 - protein, 5 aa, unidentified
DSKDA

SEQ ID NO: 796351 - protein, 5 aa, unidentified
DINDA

SEQ ID NO: 796352 - protein, 5 aa, unidentified
DEADA

SEQ ID NO: 796353 - protein, 5 aa, unidentified
DGFDA

SEQ ID NO: 796354 - protein, 5 aa, unidentified
DVLDS

SEQ ID NO: 796355 - protein, 5 aa, unidentified
DMKDC

SEQ ID NO: 796356 - protein, 5 aa, unidentified
DPHDA

SEQ ID NO: 796357 - protein, 5 aa, unidentified
DTSDA

SEQ ID NO: 796358 - protein, 5 aa, unidentified
DVVDC

SEQ ID NO: 796359 - protein, 5 aa, unidentified
DAKSA

SEQ ID NO: 796360 - protein, 5 aa, unidentified
DVIDC

SEQ ID NO: 796361 - protein, 5 aa, unidentified
DRVDS

SEQ ID NO: 796362 - protein, 5 aa, unidentified
DVCDA

SEQ ID NO: 796363 - protein, 5 aa, unidentified
DAIDS

SEQ ID NO: 796364 - protein, 5 aa, unidentified
DDADA

SEQ ID NO: 796365 - protein, 5 aa, unidentified
DKRDS

SEQ ID NO: 796366 - protein, 5 aa, unidentified
DWHEC

SEQ ID NO: 796367 - protein, 5 aa, unidentified
DRLDL

SEQ ID NO: 796368 - protein, 5 aa, unidentified
DAKDC

SEQ ID NO: 796369 - protein, 5 aa, unidentified
DQKDS

SEQ ID NO: 796370 - protein, 5 aa, unidentified
DAMDA

SEQ ID NO: 796371 - protein, 5 aa, unidentified
DVMDC

SEQ ID NO: 796372 - protein, 5 aa, unidentified
DLPDA

SEQ ID NO: 796373 - protein, 5 aa, unidentified
DHVDA

SEQ ID NO: 796374 - protein, 5 aa, unidentified
DMLDC

SEQ ID NO: 796375 - protein, 5 aa, unidentified
DPLDS

SEQ ID NO: 796376 - protein, 5 aa, unidentified
DRIDC

SEQ ID NO: 796377 - protein, 5 aa, unidentified
DTRDA

SEQ ID NO: 796378 - protein, 5 aa, unidentified
DIIDS

SEQ ID NO: 796379 - protein, 5 aa, unidentified
DKLDC

SEQ ID NO: 796380 - protein, 5 aa, unidentified
DMSDA

SEQ ID NO: 796381 - protein, 5 aa, unidentified
DSIDS

SEQ ID NO: 796382 - protein, 5 aa, unidentified
DSWDA

SEQ ID NO: 796383 - protein, 5 aa, unidentified
DISDA

SEQ ID NO: 796384 - protein, 5 aa, unidentified
DPLDT

SEQ ID NO: 796385 - protein, 5 aa, unidentified
DKQDS

SEQ ID NO: 796386 - protein, 5 aa, unidentified
DNLDA

SEQ ID NO: 796387 - protein, 5 aa, unidentified
DANDA

SEQ ID NO: 796388 - protein, 5 aa, unidentified
DLGDA

SEQ ID NO: 796389 - protein, 5 aa, unidentified
DRNDA

SEQ ID NO: 796390 - protein, 5 aa, unidentified
DLKDA

SEQ ID NO: 796391 - protein, 5 aa, unidentified
DTTDA

SEQ ID NO: 796392 - protein, 5 aa, unidentified
DLKDP

SEQ ID NO: 796393 - protein, 5 aa, unidentified
DVEDC

SEQ ID NO: 796394 - protein, 5 aa, unidentified
DKEDA

SEQ ID NO: 796395 - protein, 5 aa, unidentified
DPMDA

SEQ ID NO: 796396 - protein, 5 aa, unidentified
DRADS

SEQ ID NO: 796397 - protein, 5 aa, unidentified
DRPDA

SEQ ID NO: 796398 - protein, 5 aa, unidentified
DDNDL

SEQ ID NO: 796399 - protein, 5 aa, unidentified
DDVDA

SEQ ID NO: 796400 - protein, 5 aa, unidentified
DGVDS

SEQ ID NO: 796401 - protein, 5 aa, unidentified
DRRDC

SEQ ID NO: 796402 - protein, 5 aa, unidentified
DIVDA

SEQ ID NO: 796403 - protein, 5 aa, unidentified
DMRDA

SEQ ID NO: 796404 - protein, 5 aa, unidentified
DYKDA

SEQ ID NO: 796405 - protein, 5 aa, unidentified
DAQDA

SEQ ID NO: 796406 - protein, 5 aa, unidentified
DRISA

SEQ ID NO: 796407 - protein, 5 aa, unidentified
DTKDP

SEQ ID NO: 796408 - protein, 5 aa, unidentified
DEDDA

SEQ ID NO: 796409 - protein, 5 aa, unidentified
DEKDP

SEQ ID NO: 796410 - protein, 5 aa, unidentified
DFVDA

SEQ ID NO: 796411 - protein, 5 aa, unidentified
DLTDA

SEQ ID NO: 796412 - protein, 5 aa, unidentified
DMADC

SEQ ID NO: 796413 - protein, 5 aa, unidentified
DDTES

SEQ ID NO: 796414 - protein, 5 aa, unidentified
DILDA

SEQ ID NO: 796415 - protein, 5 aa, unidentified
DVTDS

SEQ ID NO: 796416 - protein, 5 aa, unidentified
DAVSA

SEQ ID NO: 796417 - protein, 5 aa, unidentified
DFGDA

SEQ ID NO: 796418 - protein, 5 aa, unidentified
DKTCS

SEQ ID NO: 796419 - protein, 5 aa, unidentified
DVQDS

SEQ ID NO: 796420 - protein, 5 aa, unidentified
DTIDS

SEQ ID NO: 796421 - protein, 5 aa, unidentified
DYRDS

SEQ ID NO: 796422 - protein, 5 aa, unidentified
DMADA

SEQ ID NO: 796423 - protein, 5 aa, unidentified
DSSDA

SEQ ID NO: 796424 - protein, 5 aa, unidentified
DPADS

SEQ ID NO: 796425 - protein, 5 aa, unidentified
DPIDT

SEQ ID NO: 796426 - protein, 5 aa, unidentified
DSYDA

SEQ ID NO: 796427 - protein, 5 aa, unidentified
DDIDL

SEQ ID NO: 796428 - protein, 5 aa, unidentified
DDKDG

SEQ ID NO: 796429 - protein, 5 aa, unidentified
DETDA

SEQ ID NO: 796430 - protein, 5 aa, unidentified
DKIDT

SEQ ID NO: 796431 - protein, 5 aa, unidentified
DDKDP

SEQ ID NO: 796432 - protein, 5 aa, unidentified
DEGDA

SEQ ID NO: 796433 - protein, 5 aa, unidentified
DIKDP

SEQ ID NO: 796434 - protein, 5 aa, unidentified
DKHDA

SEQ ID NO: 796435 - protein, 5 aa, unidentified
DPVEA

SEQ ID NO: 796436 - protein, 5 aa, unidentified
DRRDS

SEQ ID NO: 796437 - protein, 5 aa, unidentified
DSKDP

SEQ ID NO: 796438 - protein, 5 aa, unidentified
DSTDA

SEQ ID NO: 796439 - protein, 5 aa, unidentified
DIQDC

SEQ ID NO: 796440 - protein, 5 aa, unidentified
DRCDA

SEQ ID NO: 796441 - protein, 5 aa, unidentified
DAIDC

SEQ ID NO: 796442 - protein, 5 aa, unidentified
DLRDA

SEQ ID NO: 796443 - protein, 5 aa, unidentified
DREDA

SEQ ID NO: 796444 - protein, 5 aa, unidentified
DFIDA

SEQ ID NO: 796445 - protein, 5 aa, unidentified
DISDS

SEQ ID NO: 796446 - protein, 5 aa, unidentified
DNLDL

SEQ ID NO: 796447 - protein, 5 aa, unidentified
DAISA

SEQ ID NO: 796448 - protein, 5 aa, unidentified
DGIDS

SEQ ID NO: 796449 - protein, 5 aa, unidentified
DHRDA

SEQ ID NO: 796450 - protein, 5 aa, unidentified
DITDA

SEQ ID NO: 796451 - protein, 5 aa, unidentified
DKIDC

SEQ ID NO: 796452 - protein, 5 aa, unidentified
DWNDA

SEQ ID NO: 796453 - protein, 5 aa, unidentified
DIRDA

SEQ ID NO: 796454 - protein, 5 aa, unidentified
DKTAA

SEQ ID NO: 796455 - protein, 5 aa, unidentified
DNKDA

SEQ ID NO: 796456 - protein, 5 aa, unidentified
DQTDA

SEQ ID NO: 796457 - protein, 5 aa, unidentified
DSGDA

SEQ ID NO: 796458 - protein, 5 aa, unidentified
DDSDA

SEQ ID NO: 796459 - protein, 5 aa, unidentified
DEWDA

SEQ ID NO: 796460 - protein, 5 aa, unidentified
DKLDT

SEQ ID NO: 796461 - protein, 5 aa, unidentified
DPCDA

SEQ ID NO: 796462 - protein, 5 aa, unidentified
DTLDS

SEQ ID NO: 796463 - protein, 5 aa, unidentified
DFLDA

SEQ ID NO: 796464 - protein, 5 aa, unidentified
DSVDS

SEQ ID NO: 796465 - protein, 5 aa, unidentified
DVVDS

SEQ ID NO: 796466 - protein, 5 aa, unidentified
DALDC

SEQ ID NO: 796467 - protein, 5 aa, unidentified
DGPDA

SEQ ID NO: 796468 - protein, 5 aa, unidentified
DIADA

SEQ ID NO: 796469 - protein, 5 aa, unidentified
DKSCS

SEQ ID NO: 796470 - protein, 5 aa, unidentified
DKTSS

SEQ ID NO: 796471 - protein, 5 aa, unidentified
DRVDC

SEQ ID NO: 796472 - protein, 5 aa, unidentified
DPSDT

SEQ ID NO: 796473 - protein, 5 aa, unidentified
DDHDL

SEQ ID NO: 796474 - protein, 5 aa, unidentified
DHGDA

SEQ ID NO: 796475 - protein, 5 aa, unidentified
DPKDS

SEQ ID NO: 796476 - protein, 5 aa, unidentified
DPSDS

SEQ ID NO: 796477 - protein, 5 aa, unidentified
DRFDS

SEQ ID NO: 796478 - protein, 5 aa, unidentified
DTGDA

SEQ ID NO: 796479 - protein, 5 aa, unidentified
DVTDC

SEQ ID NO: 796480 - protein, 5 aa, unidentified
DGADA

SEQ ID NO: 796481 - protein, 5 aa, unidentified
DGRDA

SEQ ID NO: 796482 - protein, 5 aa, unidentified
DPTDC

SEQ ID NO: 796483 - protein, 5 aa, unidentified
DTNDA

SEQ ID NO: 796484 - protein, 5 aa, unidentified
DAKDP

SEQ ID NO: 796485 - protein, 5 aa, unidentified
DCIDA

SEQ ID NO: 796486 - protein, 5 aa, unidentified
DEIDS

SEQ ID NO: 796487 - protein, 5 aa, unidentified
DLNDA

SEQ ID NO: 796488 - protein, 5 aa, unidentified
DQPDA

SEQ ID NO: 796489 - protein, 5 aa, unidentified
DTKDC

SEQ ID NO: 796490 - protein, 5 aa, unidentified
DKFDS

SEQ ID NO: 796491 - protein, 5 aa, unidentified
DKVSA

SEQ ID NO: 796492 - protein, 5 aa, unidentified
DRIDT

SEQ ID NO: 796493 - protein, 5 aa, unidentified
DYVDA

SEQ ID NO: 796494 - protein, 5 aa, unidentified
DARDC

SEQ ID NO: 796495 - protein, 5 aa, unidentified
DENDA

SEQ ID NO: 796496 - protein, 5 aa, unidentified
DGGDA

SEQ ID NO: 796497 - protein, 5 aa, unidentified
DKLDL

SEQ ID NO: 796498 - protein, 5 aa, unidentified
DKMDS

SEQ ID NO: 796499 - protein, 5 aa, unidentified
DKYDA

SEQ ID NO: 796500 - protein, 5 aa, unidentified
DMQDC

SEQ ID NO: 796501 - protein, 5 aa, unidentified
DSQDA

SEQ ID NO: 796502 - protein, 5 aa, unidentified
DVIDL

SEQ ID NO: 796503 - protein, 5 aa, unidentified
DIEDA

SEQ ID NO: 796504 - protein, 5 aa, unidentified
DNVDA

SEQ ID NO: 796505 - protein, 5 aa, unidentified
DVHDC

SEQ ID NO: 796506 - protein, 5 aa, unidentified
DKRDC

SEQ ID NO: 796507 - protein, 95 aa, unidentified
  VARIANT 2: note = Any amino acid
  VARIANT 3: note = Any amino acid
  VARIANT 4: note = Any amino acid
  VARIANT 5: note = Any amino acid
  VARIANT 6: note = Any amino acid
  VARIANT 7: note = Any amino acid
  VARIANT 8: note = Any amino acid
  VARIANT 9: note = Any amino acid
  VARIANT 10: note = Any amino acid
  VARIANT 11: note = Any amino acid
  VARIANT 12: note = Any amino acid
  VARIANT 13: note = Any amino acid
  VARIANT 14: note = Any amino acid
  VARIANT 15: note = Any amino acid
  VARIANT 16: note = Any amino acid
  VARIANT 17: note = Any amino acid
  VARIANT 18: note = Any amino acid
  VARIANT 19: note = Any amino acid
  VARIANT 20: note = Any amino acid
  VARIANT 21: note = Any amino acid
  VARIANT 22: note = Any amino acid
  VARIANT 23: note = Any amino acid
  VARIANT 24: note = Any amino acid
  VARIANT 25: note = Any amino acid
  VARIANT 26: note = Any amino acid
  VARIANT 27: note = Any amino acid
  VARIANT 28: note = Any amino acid
  VARIANT 29: note = Any amino acid
  VARIANT 30: note = Any amino acid
  VARIANT 31: note = Any amino acid
  VARIANT 32: note = Any amino acid
  VARIANT 33: note = Any amino acid
  VARIANT 34: note = Any amino acid
  VARIANT 35: note = Any amino acid
  VARIANT 36: note = Any amino acid
  VARIANT 37: note = Any amino acid
  VARIANT 38: note = Any amino acid
  VARIANT 39: note = Any amino acid
  VARIANT 40: note = Any amino acid
  VARIANT 41: note = Any amino acid
  VARIANT 42: note = Any amino acid
  VARIANT 43: note = Any amino acid
  VARIANT 44: note = Any amino acid
  VARIANT 45: note = Any amino acid
  VARIANT 46: note = Any amino acid
  VARIANT 47: note = Any amino acid
  VARIANT 48: note = Any amino acid
  VARIANT 49: note = Any amino acid
  VARIANT 50: note = Any amino acid
  VARIANT 51: note = Any amino acid
  VARIANT 52: note = E or Y
  VARIANT 53: note = Any amino acid
  VARIANT 54: note = Any amino acid
  VARIANT 55: note = Any amino acid
  VARIANT 56: note = Any amino acid
  VARIANT 57: note = Any amino acid
  VARIANT 58: note = Any amino acid
  VARIANT 59: note = Any amino acid
  VARIANT 60: note = Any amino acid
  VARIANT 61: note = Any amino acid
  VARIANT 62: note = Any amino acid
  VARIANT 63: note = Any amino acid
  VARIANT 64: note = Any amino acid
  VARIANT 65: note = Any amino acid
  VARIANT 66: note = Any amino acid
  VARIANT 67: note = Any amino acid
  VARIANT 68: note = Any amino acid
  VARIANT 69: note = Any amino acid
  VARIANT 70: note = Any amino acid
  VARIANT 71: note = Any amino acid
  VARIANT 72: note = Any amino acid
  VARIANT 73: note = Any amino acid
  VARIANT 74: note = Any amino acid
  VARIANT 75: note = Any amino acid
  VARIANT 76: note = Any amino acid
  VARIANT 77: note = Any amino acid
  VARIANT 78: note = Any amino acid
  VARIANT 79: note = Any amino acid
  VARIANT 80: note = Any amino acid
  VARIANT 81: note = Any amino acid
  VARIANT 82: note = Any amino acid
  VARIANT 83: note = Any amino acid
  VARIANT 84: note = Any amino acid
  VARIANT 85: note = Any amino acid
  VARIANT 86: note = Any amino acid
  VARIANT 87: note = Any amino acid
  VARIANT 88: note = Any amino acid
  VARIANT 89: note = Any amino acid
  VARIANT 91: note = Any amino acid
  VARIANT 93: note = Any amino acid
  VARIANT 94: note = Any amino acid
  VARIANT 2..51: note = This region may encompass 42-50 residues
  VARIANT 53..89: note = This region may encompass 34-37 residues
DXXXXXXXXXXXXXXXXXXXXXXXXXXXXXXXXXXXXXXXXXXXXXXXXXXXXXXXXXXXXXXXXXXXXXXXXXXXXXXXXXXXXXXXXKXDXXD

SEQ ID NO: 796508 - protein, 87 aa, unidentified
  VARIANT 2: note = Any amino acid
  VARIANT 3: note = Any amino acid
  VARIANT 4: note = Any amino acid
  VARIANT 5: note = Any amino acid
  VARIANT 6: note = Any amino acid
  VARIANT 7: note = Any amino acid
  VARIANT 8: note = Any amino acid
  VARIANT 9: note = Any amino acid
  VARIANT 10: note = Any amino acid
  VARIANT 11: note = Any amino acid
  VARIANT 12: note = Any amino acid
  VARIANT 13: note = Any amino acid
  VARIANT 14: note = Any amino acid
  VARIANT 15: note = Any amino acid
  VARIANT 16: note = Any amino acid
  VARIANT 17: note = Any amino acid
  VARIANT 18: note = Any amino acid
  VARIANT 19: note = Any amino acid
  VARIANT 20: note = Any amino acid
  VARIANT 21: note = Any amino acid
  VARIANT 22: note = Any amino acid
  VARIANT 23: note = Any amino acid
  VARIANT 24: note = Any amino acid
  VARIANT 25: note = Any amino acid
  VARIANT 26: note = Any amino acid
  VARIANT 27: note = Any amino acid
  VARIANT 28: note = Any amino acid
  VARIANT 29: note = Any amino acid
  VARIANT 30: note = Any amino acid
  VARIANT 31: note = Any amino acid
  VARIANT 32: note = Any amino acid
  VARIANT 33: note = Any amino acid
  VARIANT 34: note = Any amino acid
  VARIANT 35: note = Any amino acid
  VARIANT 36: note = Any amino acid
  VARIANT 37: note = Any amino acid
  VARIANT 38: note = Any amino acid
  VARIANT 39: note = Any amino acid
  VARIANT 40: note = Any amino acid
  VARIANT 41: note = Any amino acid
  VARIANT 42: note = Any amino acid
  VARIANT 43: note = Any amino acid
  VARIANT 44: note = Any amino acid
  VARIANT 45: note = Any amino acid
  VARIANT 47: note = Any amino acid
  VARIANT 48: note = Any amino acid
  VARIANT 49: note = Any amino acid
  VARIANT 50: note = Any amino acid
  VARIANT 51: note = Any amino acid
  VARIANT 52: note = Any amino acid
  VARIANT 53: note = Any amino acid
  VARIANT 54: note = Any amino acid
  VARIANT 55: note = Any amino acid
  VARIANT 56: note = Any amino acid
  VARIANT 57: note = Any amino acid
  VARIANT 58: note = Any amino acid
  VARIANT 59: note = Any amino acid
  VARIANT 60: note = Any amino acid
  VARIANT 61: note = Any amino acid
  VARIANT 62: note = Any amino acid
  VARIANT 63: note = Any amino acid
  VARIANT 64: note = Any amino acid
  VARIANT 65: note = Any amino acid
  VARIANT 66: note = Any amino acid
  VARIANT 67: note = Any amino acid
  VARIANT 68: note = Any amino acid
  VARIANT 69: note = Any amino acid
  VARIANT 70: note = Any amino acid
  VARIANT 71: note = Any amino acid
  VARIANT 72: note = Any amino acid
  VARIANT 73: note = Any amino acid
  VARIANT 74: note = Any amino acid
  VARIANT 75: note = Any amino acid
  VARIANT 76: note = Any amino acid
  VARIANT 77: note = Any amino acid
  VARIANT 78: note = Any amino acid
  VARIANT 79: note = Any amino acid
  VARIANT 80: note = Any amino acid
  VARIANT 81: note = Any amino acid
  VARIANT 83: note = Any amino acid
  VARIANT 85: note = Any amino acid
  VARIANT 86: note = Any amino acid
DXXXXXXXXXXXXXXXXXXXXXXXXXXXXXXXXXXXXXXXXXXXXEXXXXXXXXXXXXXXXXXXXXXXXXXXXXXXXXXXXKXDXXD

SEQ ID NO: 796509 - protein, 90 aa, unidentified
  VARIANT 2: note = Any amino acid
  VARIANT 3: note = Any amino acid
  VARIANT 4: note = Any amino acid
  VARIANT 5: note = Any amino acid
  VARIANT 6: note = Any amino acid
  VARIANT 7: note = Any amino acid
  VARIANT 8: note = Any amino acid
  VARIANT 9: note = Any amino acid
  VARIANT 10: note = Any amino acid
  VARIANT 11: note = Any amino acid
  VARIANT 12: note = Any amino acid
  VARIANT 13: note = Any amino acid
  VARIANT 14: note = Any amino acid
  VARIANT 15: note = Any amino acid
  VARIANT 16: note = Any amino acid
  VARIANT 17: note = Any amino acid
  VARIANT 18: note = Any amino acid
  VARIANT 19: note = Any amino acid
  VARIANT 20: note = Any amino acid
  VARIANT 21: note = Any amino acid
  VARIANT 22: note = Any amino acid
  VARIANT 23: note = Any amino acid
  VARIANT 24: note = Any amino acid
  VARIANT 25: note = Any amino acid
  VARIANT 26: note = Any amino acid
  VARIANT 27: note = Any amino acid
  VARIANT 28: note = Any amino acid
  VARIANT 29: note = Any amino acid
  VARIANT 30: note = Any amino acid
  VARIANT 31: note = Any amino acid
  VARIANT 32: note = Any amino acid
  VARIANT 33: note = Any amino acid
  VARIANT 34: note = Any amino acid
  VARIANT 35: note = Any amino acid
  VARIANT 36: note = Any amino acid
  VARIANT 37: note = Any amino acid
  VARIANT 38: note = Any amino acid
  VARIANT 39: note = Any amino acid
  VARIANT 40: note = Any amino acid
  VARIANT 41: note = Any amino acid
  VARIANT 42: note = Any amino acid
  VARIANT 43: note = Any amino acid
  VARIANT 44: note = Any amino acid
  VARIANT 45: note = Any amino acid
  VARIANT 46: note = Any amino acid
  VARIANT 48: note = Any amino acid
  VARIANT 49: note = Any amino acid
  VARIANT 50: note = Any amino acid
  VARIANT 51: note = Any amino acid
  VARIANT 52: note = Any amino acid
  VARIANT 53: note = Any amino acid
  VARIANT 54: note = Any amino acid
  VARIANT 55: note = Any amino acid
  VARIANT 56: note = Any amino acid
  VARIANT 57: note = Any amino acid
  VARIANT 58: note = Any amino acid
  VARIANT 59: note = Any amino acid
  VARIANT 60: note = Any amino acid
  VARIANT 61: note = Any amino acid
  VARIANT 62: note = Any amino acid
  VARIANT 63: note = Any amino acid
  VARIANT 64: note = Any amino acid
  VARIANT 65: note = Any amino acid
  VARIANT 66: note = Any amino acid
  VARIANT 67: note = Any amino acid
  VARIANT 68: note = Any amino acid
  VARIANT 69: note = Any amino acid
  VARIANT 70: note = Any amino acid
  VARIANT 71: note = Any amino acid
  VARIANT 72: note = Any amino acid
  VARIANT 73: note = Any amino acid
  VARIANT 74: note = Any amino acid
  VARIANT 75: note = Any amino acid
  VARIANT 76: note = Any amino acid
  VARIANT 77: note = Any amino acid
  VARIANT 78: note = Any amino acid
  VARIANT 79: note = Any amino acid
  VARIANT 80: note = Any amino acid
  VARIANT 81: note = Any amino acid
  VARIANT 82: note = Any amino acid
  VARIANT 83: note = Any amino acid
  VARIANT 84: note = Any amino acid
  VARIANT 86: note = Any amino acid
  VARIANT 88: note = Any amino acid
  VARIANT 89: note = Any amino acid
DXXXXXXXXXXXXXXXXXXXXXXXXXXXXXXXXXXXXXXXXXXXXXYXXXXXXXXXXXXXXXXXXXXXXXXXXXXXXXXXXXXXKXDXXD

SEQ ID NO: 796510 - protein, 88 aa, unidentified
  VARIANT 2: note = Any amino acid
  VARIANT 3: note = Any amino acid
  VARIANT 4: note = Any amino acid
  VARIANT 5: note = Any amino acid
  VARIANT 6: note = Any amino acid
  VARIANT 7: note = Any amino acid
  VARIANT 8: note = Any amino acid
  VARIANT 9: note = Any amino acid
  VARIANT 10: note = Any amino acid
  VARIANT 11: note = Any amino acid
  VARIANT 12: note = Any amino acid
  VARIANT 13: note = Any amino acid
  VARIANT 14: note = Any amino acid
  VARIANT 15: note = Any amino acid
  VARIANT 16: note = Any amino acid
  VARIANT 17: note = Any amino acid
  VARIANT 18: note = Any amino acid
  VARIANT 19: note = Any amino acid
  VARIANT 20: note = Any amino acid
  VARIANT 21: note = Any amino acid
  VARIANT 22: note = Any amino acid
  VARIANT 23: note = Any amino acid
  VARIANT 24: note = Any amino acid
  VARIANT 25: note = Any amino acid
  VARIANT 26: note = Any amino acid
  VARIANT 27: note = Any amino acid
  VARIANT 28: note = Any amino acid
  VARIANT 29: note = Any amino acid
  VARIANT 30: note = Any amino acid
  VARIANT 31: note = Any amino acid
  VARIANT 32: note = Any amino acid
  VARIANT 33: note = Any amino acid
  VARIANT 34: note = Any amino acid
  VARIANT 35: note = Any amino acid
  VARIANT 36: note = Any amino acid
  VARIANT 37: note = Any amino acid
  VARIANT 38: note = Any amino acid
  VARIANT 39: note = Any amino acid
  VARIANT 40: note = Any amino acid
  VARIANT 41: note = Any amino acid
  VARIANT 42: note = Any amino acid
  VARIANT 43: note = Any amino acid
  VARIANT 44: note = Any amino acid
  VARIANT 45: note = Any amino acid
  VARIANT 47: note = Any amino acid
  VARIANT 48: note = Any amino acid
  VARIANT 49: note = Any amino acid
  VARIANT 50: note = Any amino acid
  VARIANT 51: note = Any amino acid
  VARIANT 52: note = Any amino acid
  VARIANT 53: note = Any amino acid
  VARIANT 54: note = Any amino acid
  VARIANT 55: note = Any amino acid
  VARIANT 56: note = Any amino acid
  VARIANT 57: note = Any amino acid
  VARIANT 58: note = Any amino acid
  VARIANT 59: note = Any amino acid
  VARIANT 60: note = Any amino acid
  VARIANT 61: note = Any amino acid
  VARIANT 62: note = Any amino acid
  VARIANT 63: note = Any amino acid
  VARIANT 64: note = Any amino acid
  VARIANT 65: note = Any amino acid
  VARIANT 66: note = Any amino acid
  VARIANT 67: note = Any amino acid
  VARIANT 68: note = Any amino acid
  VARIANT 69: note = Any amino acid
  VARIANT 70: note = Any amino acid
  VARIANT 71: note = Any amino acid
  VARIANT 72: note = Any amino acid
  VARIANT 73: note = Any amino acid
  VARIANT 74: note = Any amino acid
  VARIANT 75: note = Any amino acid
  VARIANT 76: note = Any amino acid
  VARIANT 77: note = Any amino acid
  VARIANT 78: note = Any amino acid
  VARIANT 79: note = Any amino acid
  VARIANT 80: note = Any amino acid
  VARIANT 81: note = Any amino acid
  VARIANT 82: note = Any amino acid
  VARIANT 84: note = Any amino acid
  VARIANT 86: note = Any amino acid
  VARIANT 87: note = Any amino acid
DXXXXXXXXXXXXXXXXXXXXXXXXXXXXXXXXXXXXXXXXXXXXEXXXXXXXXXXXXXXXXXXXXXXXXXXXXXXXXXXXXKXDXXD

SEQ ID NO: 796511 - protein, 89 aa, unidentified
  VARIANT 2: note = Any amino acid
  VARIANT 3: note = Any amino acid
  VARIANT 4: note = Any amino acid
  VARIANT 5: note = Any amino acid
  VARIANT 6: note = Any amino acid
  VARIANT 7: note = Any amino acid
  VARIANT 8: note = Any amino acid
  VARIANT 9: note = Any amino acid
  VARIANT 10: note = Any amino acid
  VARIANT 11: note = Any amino acid
  VARIANT 12: note = Any amino acid
  VARIANT 13: note = Any amino acid
  VARIANT 14: note = Any amino acid
  VARIANT 15: note = Any amino acid
  VARIANT 16: note = Any amino acid
  VARIANT 17: note = Any amino acid
  VARIANT 18: note = Any amino acid
  VARIANT 19: note = Any amino acid
  VARIANT 20: note = Any amino acid
  VARIANT 21: note = Any amino acid
  VARIANT 22: note = Any amino acid
  VARIANT 23: note = Any amino acid
  VARIANT 24: note = Any amino acid
  VARIANT 25: note = Any amino acid
  VARIANT 26: note = Any amino acid
  VARIANT 27: note = Any amino acid
  VARIANT 28: note = Any amino acid
  VARIANT 29: note = Any amino acid
  VARIANT 30: note = Any amino acid
  VARIANT 31: note = Any amino acid
  VARIANT 32: note = Any amino acid
  VARIANT 33: note = Any amino acid
  VARIANT 34: note = Any amino acid
  VARIANT 35: note = Any amino acid
  VARIANT 36: note = Any amino acid
  VARIANT 37: note = Any amino acid
  VARIANT 38: note = Any amino acid
  VARIANT 39: note = Any amino acid
  VARIANT 40: note = Any amino acid
  VARIANT 41: note = Any amino acid
  VARIANT 42: note = Any amino acid
  VARIANT 43: note = Any amino acid
  VARIANT 44: note = Any amino acid
  VARIANT 45: note = Any amino acid
  VARIANT 46: note = Any amino acid
  VARIANT 48: note = Any amino acid
  VARIANT 49: note = Any amino acid
  VARIANT 50: note = Any amino acid
  VARIANT 51: note = Any amino acid
  VARIANT 52: note = Any amino acid
  VARIANT 53: note = Any amino acid
  VARIANT 54: note = Any amino acid
  VARIANT 55: note = Any amino acid
  VARIANT 56: note = Any amino acid
  VARIANT 57: note = Any amino acid
  VARIANT 58: note = Any amino acid
  VARIANT 59: note = Any amino acid
  VARIANT 60: note = Any amino acid
  VARIANT 61: note = Any amino acid
  VARIANT 62: note = Any amino acid
  VARIANT 63: note = Any amino acid
  VARIANT 64: note = Any amino acid
  VARIANT 65: note = Any amino acid
  VARIANT 66: note = Any amino acid
  VARIANT 67: note = Any amino acid
  VARIANT 68: note = Any amino acid
  VARIANT 69: note = Any amino acid
  VARIANT 70: note = Any amino acid
  VARIANT 71: note = Any amino acid
  VARIANT 72: note = Any amino acid
  VARIANT 73: note = Any amino acid
  VARIANT 74: note = Any amino acid
  VARIANT 75: note = Any amino acid
  VARIANT 76: note = Any amino acid
  VARIANT 77: note = Any amino acid
  VARIANT 78: note = Any amino acid
  VARIANT 79: note = Any amino acid
  VARIANT 80: note = Any amino acid
  VARIANT 81: note = Any amino acid
  VARIANT 82: note = Any amino acid
  VARIANT 83: note = Any amino acid
  VARIANT 85: note = Any amino acid
  VARIANT 87: note = Any amino acid
  VARIANT 88: note = Any amino acid
DXXXXXXXXXXXXXXXXXXXXXXXXXXXXXXXXXXXXXXXXXXXXXEXXXXXXXXXXXXXXXXXXXXXXXXXXXXXXXXXXXXKXDXXD

SEQ ID NO: 796512 - protein, 88 aa, unidentified
  VARIANT 2: note = Any amino acid
  VARIANT 3: note = Any amino acid
  VARIANT 4: note = Any amino acid
  VARIANT 5: note = Any amino acid
  VARIANT 6: note = Any amino acid
  VARIANT 7: note = Any amino acid
  VARIANT 8: note = Any amino acid
  VARIANT 9: note = Any amino acid
  VARIANT 10: note = Any amino acid
  VARIANT 11: note = Any amino acid
  VARIANT 12: note = Any amino acid
  VARIANT 13: note = Any amino acid
  VARIANT 14: note = Any amino acid
  VARIANT 15: note = Any amino acid
  VARIANT 16: note = Any amino acid
  VARIANT 17: note = Any amino acid
  VARIANT 18: note = Any amino acid
  VARIANT 19: note = Any amino acid
  VARIANT 20: note = Any amino acid
  VARIANT 21: note = Any amino acid
  VARIANT 22: note = Any amino acid
  VARIANT 23: note = Any amino acid
  VARIANT 24: note = Any amino acid
  VARIANT 25: note = Any amino acid
  VARIANT 26: note = Any amino acid
  VARIANT 27: note = Any amino acid
  VARIANT 28: note = Any amino acid
  VARIANT 29: note = Any amino acid
  VARIANT 30: note = Any amino acid
  VARIANT 31: note = Any amino acid
  VARIANT 32: note = Any amino acid
  VARIANT 33: note = Any amino acid
  VARIANT 34: note = Any amino acid
  VARIANT 35: note = Any amino acid
  VARIANT 36: note = Any amino acid
  VARIANT 37: note = Any amino acid
  VARIANT 38: note = Any amino acid
  VARIANT 39: note = Any amino acid
  VARIANT 40: note = Any amino acid
  VARIANT 41: note = Any amino acid
  VARIANT 42: note = Any amino acid
  VARIANT 43: note = Any amino acid
  VARIANT 44: note = Any amino acid
  VARIANT 45: note = Any amino acid
  VARIANT 47: note = Any amino acid
  VARIANT 48: note = Any amino acid
  VARIANT 49: note = Any amino acid
  VARIANT 50: note = Any amino acid
  VARIANT 51: note = Any amino acid
  VARIANT 52: note = Any amino acid
  VARIANT 53: note = Any amino acid
  VARIANT 54: note = Any amino acid
  VARIANT 55: note = Any amino acid
  VARIANT 56: note = Any amino acid
  VARIANT 57: note = Any amino acid
  VARIANT 58: note = Any amino acid
  VARIANT 59: note = Any amino acid
  VARIANT 60: note = Any amino acid
  VARIANT 61: note = Any amino acid
  VARIANT 62: note = Any amino acid
  VARIANT 63: note = Any amino acid
  VARIANT 64: note = Any amino acid
  VARIANT 65: note = Any amino acid
  VARIANT 66: note = Any amino acid
  VARIANT 67: note = Any amino acid
  VARIANT 68: note = Any amino acid
  VARIANT 69: note = Any amino acid
  VARIANT 70: note = Any amino acid
  VARIANT 71: note = Any amino acid
  VARIANT 72: note = Any amino acid
  VARIANT 73: note = Any amino acid
  VARIANT 74: note = Any amino acid
  VARIANT 75: note = Any amino acid
  VARIANT 76: note = Any amino acid
  VARIANT 77: note = Any amino acid
  VARIANT 78: note = Any amino acid
  VARIANT 79: note = Any amino acid
  VARIANT 80: note = Any amino acid
  VARIANT 81: note = Any amino acid
  VARIANT 82: note = Any amino acid
  VARIANT 84: note = Any amino acid
  VARIANT 86: note = Any amino acid
  VARIANT 87: note = Any amino acid
DXXXXXXXXXXXXXXXXXXXXXXXXXXXXXXXXXXXXXXXXXXXXYXXXXXXXXXXXXXXXXXXXXXXXXXXXXXXXXXXXXKXDXXD

SEQ ID NO: 796513 - protein, 93 aa, unidentified
  VARIANT 2: note = Any amino acid
  VARIANT 3: note = Any amino acid
  VARIANT 4: note = Any amino acid
  VARIANT 5: note = Any amino acid
  VARIANT 6: note = Any amino acid
  VARIANT 7: note = Any amino acid
  VARIANT 8: note = Any amino acid
  VARIANT 9: note = Any amino acid
  VARIANT 10: note = Any amino acid
  VARIANT 11: note = Any amino acid
  VARIANT 12: note = Any amino acid
  VARIANT 13: note = Any amino acid
  VARIANT 14: note = Any amino acid
  VARIANT 15: note = Any amino acid
  VARIANT 16: note = Any amino acid
  VARIANT 17: note = Any amino acid
  VARIANT 18: note = Any amino acid
  VARIANT 19: note = Any amino acid
  VARIANT 20: note = Any amino acid
  VARIANT 21: note = Any amino acid
  VARIANT 22: note = Any amino acid
  VARIANT 23: note = Any amino acid
  VARIANT 24: note = Any amino acid
  VARIANT 25: note = Any amino acid
  VARIANT 26: note = Any amino acid
  VARIANT 27: note = Any amino acid
  VARIANT 28: note = Any amino acid
  VARIANT 29: note = Any amino acid
  VARIANT 30: note = Any amino acid
  VARIANT 31: note = Any amino acid
  VARIANT 32: note = Any amino acid
  VARIANT 33: note = Any amino acid
  VARIANT 34: note = Any amino acid
  VARIANT 35: note = Any amino acid
  VARIANT 36: note = Any amino acid
  VARIANT 37: note = Any amino acid
  VARIANT 38: note = Any amino acid
  VARIANT 39: note = Any amino acid
  VARIANT 40: note = Any amino acid
  VARIANT 41: note = Any amino acid
  VARIANT 42: note = Any amino acid
  VARIANT 43: note = Any amino acid
  VARIANT 44: note = Any amino acid
  VARIANT 45: note = Any amino acid
  VARIANT 46: note = Any amino acid
  VARIANT 47: note = Any amino acid
  VARIANT 48: note = Any amino acid
  VARIANT 49: note = Any amino acid
  VARIANT 50: note = Any amino acid
  VARIANT 51: note = Any amino acid
  VARIANT 53: note = Any amino acid
  VARIANT 54: note = Any amino acid
  VARIANT 55: note = Any amino acid
  VARIANT 56: note = Any amino acid
  VARIANT 57: note = Any amino acid
  VARIANT 58: note = Any amino acid
  VARIANT 59: note = Any amino acid
  VARIANT 60: note = Any amino acid
  VARIANT 61: note = Any amino acid
  VARIANT 62: note = Any amino acid
  VARIANT 63: note = Any amino acid
  VARIANT 64: note = Any amino acid
  VARIANT 65: note = Any amino acid
  VARIANT 66: note = Any amino acid
  VARIANT 67: note = Any amino acid
  VARIANT 68: note = Any amino acid
  VARIANT 69: note = Any amino acid
  VARIANT 70: note = Any amino acid
  VARIANT 71: note = Any amino acid
  VARIANT 72: note = Any amino acid
  VARIANT 73: note = Any amino acid
  VARIANT 74: note = Any amino acid
  VARIANT 75: note = Any amino acid
  VARIANT 76: note = Any amino acid
  VARIANT 77: note = Any amino acid
  VARIANT 78: note = Any amino acid
  VARIANT 79: note = Any amino acid
  VARIANT 80: note = Any amino acid
  VARIANT 81: note = Any amino acid
  VARIANT 82: note = Any amino acid
  VARIANT 83: note = Any amino acid
  VARIANT 84: note = Any amino acid
  VARIANT 85: note = Any amino acid
  VARIANT 86: note = Any amino acid
  VARIANT 87: note = Any amino acid
  VARIANT 89: note = Any amino acid
  VARIANT 91: note = Any amino acid
  VARIANT 92: note = Any amino acid
DXXXXXXXXXXXXXXXXXXXXXXXXXXXXXXXXXXXXXXXXXXXXXXXXXXEXXXXXXXXXXXXXXXXXXXXXXXXXXXXXXXXXXXKXNXXD

SEQ ID NO: 796514 - protein, 87 aa, unidentified
  VARIANT 2: note = Any amino acid
  VARIANT 3: note = Any amino acid
  VARIANT 4: note = Any amino acid
  VARIANT 5: note = Any amino acid
  VARIANT 6: note = Any amino acid
  VARIANT 7: note = Any amino acid
  VARIANT 8: note = Any amino acid
  VARIANT 9: note = Any amino acid
  VARIANT 10: note = Any amino acid
  VARIANT 11: note = Any amino acid
  VARIANT 12: note = Any amino acid
  VARIANT 13: note = Any amino acid
  VARIANT 14: note = Any amino acid
  VARIANT 15: note = Any amino acid
  VARIANT 16: note = Any amino acid
  VARIANT 17: note = Any amino acid
  VARIANT 18: note = Any amino acid
  VARIANT 19: note = Any amino acid
  VARIANT 20: note = Any amino acid
  VARIANT 21: note = Any amino acid
  VARIANT 22: note = Any amino acid
  VARIANT 23: note = Any amino acid
  VARIANT 24: note = Any amino acid
  VARIANT 25: note = Any amino acid
  VARIANT 26: note = Any amino acid
  VARIANT 27: note = Any amino acid
  VARIANT 28: note = Any amino acid
  VARIANT 29: note = Any amino acid
  VARIANT 30: note = Any amino acid
  VARIANT 31: note = Any amino acid
  VARIANT 32: note = Any amino acid
  VARIANT 33: note = Any amino acid
  VARIANT 34: note = Any amino acid
  VARIANT 35: note = Any amino acid
  VARIANT 36: note = Any amino acid
  VARIANT 37: note = Any amino acid
  VARIANT 38: note = Any amino acid
  VARIANT 39: note = Any amino acid
  VARIANT 40: note = Any amino acid
  VARIANT 41: note = Any amino acid
  VARIANT 42: note = Any amino acid
  VARIANT 43: note = Any amino acid
  VARIANT 45: note = Any amino acid
  VARIANT 46: note = Any amino acid
  VARIANT 47: note = Any amino acid
  VARIANT 48: note = Any amino acid
  VARIANT 49: note = Any amino acid
  VARIANT 50: note = Any amino acid
  VARIANT 51: note = Any amino acid
  VARIANT 52: note = Any amino acid
  VARIANT 53: note = Any amino acid
  VARIANT 54: note = Any amino acid
  VARIANT 55: note = Any amino acid
  VARIANT 56: note = Any amino acid
  VARIANT 57: note = Any amino acid
  VARIANT 58: note = Any amino acid
  VARIANT 59: note = Any amino acid
  VARIANT 60: note = Any amino acid
  VARIANT 61: note = Any amino acid
  VARIANT 62: note = Any amino acid
  VARIANT 63: note = Any amino acid
  VARIANT 64: note = Any amino acid
  VARIANT 65: note = Any amino acid
  VARIANT 66: note = Any amino acid
  VARIANT 67: note = Any amino acid
  VARIANT 68: note = Any amino acid
  VARIANT 69: note = Any amino acid
  VARIANT 70: note = Any amino acid
  VARIANT 71: note = Any amino acid
  VARIANT 72: note = Any amino acid
  VARIANT 73: note = Any amino acid
  VARIANT 74: note = Any amino acid
  VARIANT 75: note = Any amino acid
  VARIANT 76: note = Any amino acid
  VARIANT 77: note = Any amino acid
  VARIANT 78: note = Any amino acid
  VARIANT 79: note = Any amino acid
  VARIANT 80: note = Any amino acid
  VARIANT 81: note = Any amino acid
  VARIANT 83: note = Any amino acid
  VARIANT 85: note = Any amino acid
  VARIANT 86: note = Any amino acid
DXXXXXXXXXXXXXXXXXXXXXXXXXXXXXXXXXXXXXXXXXXEXXXXXXXXXXXXXXXXXXXXXXXXXXXXXXXXXXXXXKXDXXD

SEQ ID NO: 796515 - protein, 85 aa, unidentified
  VARIANT 2: note = Any amino acid
  VARIANT 3: note = Any amino acid
  VARIANT 4: note = Any amino acid
  VARIANT 5: note = Any amino acid
  VARIANT 6: note = Any amino acid
  VARIANT 7: note = Any amino acid
  VARIANT 8: note = Any amino acid
  VARIANT 9: note = Any amino acid
  VARIANT 10: note = Any amino acid
  VARIANT 11: note = Any amino acid
  VARIANT 12: note = Any amino acid
  VARIANT 13: note = Any amino acid
  VARIANT 14: note = Any amino acid
  VARIANT 15: note = Any amino acid
  VARIANT 16: note = Any amino acid
  VARIANT 17: note = Any amino acid
  VARIANT 18: note = Any amino acid
  VARIANT 19: note = Any amino acid
  VARIANT 20: note = Any amino acid
  VARIANT 21: note = Any amino acid
  VARIANT 22: note = Any amino acid
  VARIANT 23: note = Any amino acid
  VARIANT 24: note = Any amino acid
  VARIANT 25: note = Any amino acid
  VARIANT 26: note = Any amino acid
  VARIANT 27: note = Any amino acid
  VARIANT 28: note = Any amino acid
  VARIANT 29: note = Any amino acid
  VARIANT 30: note = Any amino acid
  VARIANT 31: note = Any amino acid
  VARIANT 32: note = Any amino acid
  VARIANT 33: note = Any amino acid
  VARIANT 34: note = Any amino acid
  VARIANT 35: note = Any amino acid
  VARIANT 36: note = Any amino acid
  VARIANT 37: note = Any amino acid
  VARIANT 38: note = Any amino acid
  VARIANT 39: note = Any amino acid
  VARIANT 40: note = Any amino acid
  VARIANT 41: note = Any amino acid
  VARIANT 42: note = Any amino acid
  VARIANT 43: note = Any amino acid
  VARIANT 44: note = Any amino acid
  VARIANT 45: note = Any amino acid
  VARIANT 46: note = Any amino acid
  VARIANT 48: note = Any amino acid
  VARIANT 49: note = Any amino acid
  VARIANT 50: note = Any amino acid
  VARIANT 51: note = Any amino acid
  VARIANT 52: note = Any amino acid
  VARIANT 53: note = Any amino acid
  VARIANT 54: note = Any amino acid
  VARIANT 55: note = Any amino acid
  VARIANT 56: note = Any amino acid
  VARIANT 57: note = Any amino acid
  VARIANT 58: note = Any amino acid
  VARIANT 59: note = Any amino acid
  VARIANT 60: note = Any amino acid
  VARIANT 61: note = Any amino acid
  VARIANT 62: note = Any amino acid
  VARIANT 63: note = Any amino acid
  VARIANT 64: note = Any amino acid
  VARIANT 65: note = Any amino acid
  VARIANT 66: note = Any amino acid
  VARIANT 67: note = Any amino acid
  VARIANT 68: note = Any amino acid
  VARIANT 69: note = Any amino acid
  VARIANT 70: note = Any amino acid
  VARIANT 71: note = Any amino acid
  VARIANT 72: note = Any amino acid
  VARIANT 73: note = Any amino acid
  VARIANT 74: note = Any amino acid
  VARIANT 75: note = Any amino acid
  VARIANT 76: note = Any amino acid
  VARIANT 77: note = Any amino acid
  VARIANT 78: note = Any amino acid
  VARIANT 79: note = Any amino acid
  VARIANT 81: note = Any amino acid
  VARIANT 83: note = Any amino acid
  VARIANT 84: note = Any amino acid
DXXXXXXXXXXXXXXXXXXXXXXXXXXXXXXXXXXXXXXXXXXXXXEXXXXXXXXXXXXXXXXXXXXXXXXXXXXXXXXKXDXXD

SEQ ID NO: 796516 - protein, 93 aa, unidentified
  VARIANT 2: note = Any amino acid
  VARIANT 3: note = Any amino acid
  VARIANT 4: note = Any amino acid
  VARIANT 5: note = Any amino acid
  VARIANT 6: note = Any amino acid
  VARIANT 7: note = Any amino acid
  VARIANT 8: note = Any amino acid
  VARIANT 9: note = Any amino acid
  VARIANT 10: note = Any amino acid
  VARIANT 11: note = Any amino acid
  VARIANT 12: note = Any amino acid
  VARIANT 13: note = Any amino acid
  VARIANT 14: note = Any amino acid
  VARIANT 15: note = Any amino acid
  VARIANT 16: note = Any amino acid
  VARIANT 17: note = Any amino acid
  VARIANT 18: note = Any amino acid
  VARIANT 19: note = Any amino acid
  VARIANT 20: note = Any amino acid
  VARIANT 21: note = Any amino acid
  VARIANT 22: note = Any amino acid
  VARIANT 23: note = Any amino acid
  VARIANT 24: note = Any amino acid
  VARIANT 25: note = Any amino acid
  VARIANT 26: note = Any amino acid
  VARIANT 27: note = Any amino acid
  VARIANT 28: note = Any amino acid
  VARIANT 29: note = Any amino acid
  VARIANT 30: note = Any amino acid
  VARIANT 31: note = Any amino acid
  VARIANT 32: note = Any amino acid
  VARIANT 33: note = Any amino acid
  VARIANT 34: note = Any amino acid
  VARIANT 35: note = Any amino acid
  VARIANT 36: note = Any amino acid
  VARIANT 37: note = Any amino acid
  VARIANT 38: note = Any amino acid
  VARIANT 39: note = Any amino acid
  VARIANT 40: note = Any amino acid
  VARIANT 41: note = Any amino acid
  VARIANT 42: note = Any amino acid
  VARIANT 43: note = Any amino acid
  VARIANT 44: note = Any amino acid
  VARIANT 45: note = Any amino acid
  VARIANT 46: note = Any amino acid
  VARIANT 47: note = Any amino acid
  VARIANT 48: note = Any amino acid
  VARIANT 49: note = Any amino acid
  VARIANT 50: note = Any amino acid
  VARIANT 52: note = Any amino acid
  VARIANT 53: note = Any amino acid
  VARIANT 54: note = Any amino acid
  VARIANT 55: note = Any amino acid
  VARIANT 56: note = Any amino acid
  VARIANT 57: note = Any amino acid
  VARIANT 58: note = Any amino acid
  VARIANT 59: note = Any amino acid
  VARIANT 60: note = Any amino acid
  VARIANT 61: note = Any amino acid
  VARIANT 62: note = Any amino acid
  VARIANT 63: note = Any amino acid
  VARIANT 64: note = Any amino acid
  VARIANT 65: note = Any amino acid
  VARIANT 66: note = Any amino acid
  VARIANT 67: note = Any amino acid
  VARIANT 68: note = Any amino acid
  VARIANT 69: note = Any amino acid
  VARIANT 70: note = Any amino acid
  VARIANT 71: note = Any amino acid
  VARIANT 72: note = Any amino acid
  VARIANT 73: note = Any amino acid
  VARIANT 74: note = Any amino acid
  VARIANT 75: note = Any amino acid
  VARIANT 76: note = Any amino acid
  VARIANT 77: note = Any amino acid
  VARIANT 78: note = Any amino acid
  VARIANT 79: note = Any amino acid
  VARIANT 80: note = Any amino acid
  VARIANT 81: note = Any amino acid
  VARIANT 82: note = Any amino acid
  VARIANT 83: note = Any amino acid
  VARIANT 84: note = Any amino acid
  VARIANT 85: note = Any amino acid
  VARIANT 86: note = Any amino acid
  VARIANT 87: note = Any amino acid
  VARIANT 89: note = Any amino acid
  VARIANT 91: note = Any amino acid
  VARIANT 92: note = Any amino acid
DXXXXXXXXXXXXXXXXXXXXXXXXXXXXXXXXXXXXXXXXXXXXXXXXXYXXXXXXXXXXXXXXXXXXXXXXXXXXXXXXXXXXXXKXDXXD

SEQ ID NO: 796517 - protein, 92 aa, unidentified
  VARIANT 2: note = Any amino acid
  VARIANT 3: note = Any amino acid
  VARIANT 4: note = Any amino acid
  VARIANT 5: note = Any amino acid
  VARIANT 6: note = Any amino acid
  VARIANT 7: note = Any amino acid
  VARIANT 8: note = Any amino acid
  VARIANT 9: note = Any amino acid
  VARIANT 10: note = Any amino acid
  VARIANT 11: note = Any amino acid
  VARIANT 12: note = Any amino acid
  VARIANT 13: note = Any amino acid
  VARIANT 14: note = Any amino acid
  VARIANT 15: note = Any amino acid
  VARIANT 16: note = Any amino acid
  VARIANT 17: note = Any amino acid
  VARIANT 18: note = Any amino acid
  VARIANT 19: note = Any amino acid
  VARIANT 20: note = Any amino acid
  VARIANT 21: note = Any amino acid
  VARIANT 22: note = Any amino acid
  VARIANT 23: note = Any amino acid
  VARIANT 24: note = Any amino acid
  VARIANT 25: note = Any amino acid
  VARIANT 26: note = Any amino acid
  VARIANT 27: note = Any amino acid
  VARIANT 28: note = Any amino acid
  VARIANT 29: note = Any amino acid
  VARIANT 30: note = Any amino acid
  VARIANT 31: note = Any amino acid
  VARIANT 32: note = Any amino acid
  VARIANT 33: note = Any amino acid
  VARIANT 34: note = Any amino acid
  VARIANT 35: note = Any amino acid
  VARIANT 36: note = Any amino acid
  VARIANT 37: note = Any amino acid
  VARIANT 38: note = Any amino acid
  VARIANT 39: note = Any amino acid
  VARIANT 40: note = Any amino acid
  VARIANT 41: note = Any amino acid
  VARIANT 42: note = Any amino acid
  VARIANT 43: note = Any amino acid
  VARIANT 44: note = Any amino acid
  VARIANT 45: note = Any amino acid
  VARIANT 46: note = Any amino acid
  VARIANT 47: note = Any amino acid
  VARIANT 48: note = Any amino acid
  VARIANT 49: note = Any amino acid
  VARIANT 51: note = Any amino acid
  VARIANT 52: note = Any amino acid
  VARIANT 53: note = Any amino acid
  VARIANT 54: note = Any amino acid
  VARIANT 55: note = Any amino acid
  VARIANT 56: note = Any amino acid
  VARIANT 57: note = Any amino acid
  VARIANT 58: note = Any amino acid
  VARIANT 59: note = Any amino acid
  VARIANT 60: note = Any amino acid
  VARIANT 61: note = Any amino acid
  VARIANT 62: note = Any amino acid
  VARIANT 63: note = Any amino acid
  VARIANT 64: note = Any amino acid
  VARIANT 65: note = Any amino acid
  VARIANT 66: note = Any amino acid
  VARIANT 67: note = Any amino acid
  VARIANT 68: note = Any amino acid
  VARIANT 69: note = Any amino acid
  VARIANT 70: note = Any amino acid
  VARIANT 71: note = Any amino acid
  VARIANT 72: note = Any amino acid
  VARIANT 73: note = Any amino acid
  VARIANT 74: note = Any amino acid
  VARIANT 75: note = Any amino acid
  VARIANT 76: note = Any amino acid
  VARIANT 77: note = Any amino acid
  VARIANT 78: note = Any amino acid
  VARIANT 79: note = Any amino acid
  VARIANT 80: note = Any amino acid
  VARIANT 81: note = Any amino acid
  VARIANT 82: note = Any amino acid
  VARIANT 83: note = Any amino acid
  VARIANT 84: note = Any amino acid
  VARIANT 85: note = Any amino acid
  VARIANT 86: note = Any amino acid
  VARIANT 88: note = Any amino acid
  VARIANT 90: note = Any amino acid
  VARIANT 91: note = Any amino acid
DXXXXXXXXXXXXXXXXXXXXXXXXXXXXXXXXXXXXXXXXXXXXXXXXYXXXXXXXXXXXXXXXXXXXXXXXXXXXXXXXXXXXXKXDXXD

SEQ ID NO: 796518 - protein, 86 aa, unidentified
  VARIANT 2: note = Any amino acid
  VARIANT 3: note = Any amino acid
  VARIANT 4: note = Any amino acid
  VARIANT 5: note = Any amino acid
  VARIANT 6: note = Any amino acid
  VARIANT 7: note = Any amino acid
  VARIANT 8: note = Any amino acid
  VARIANT 9: note = Any amino acid
  VARIANT 10: note = Any amino acid
  VARIANT 11: note = Any amino acid
  VARIANT 12: note = Any amino acid
  VARIANT 13: note = Any amino acid
  VARIANT 14: note = Any amino acid
  VARIANT 15: note = Any amino acid
  VARIANT 16: note = Any amino acid
  VARIANT 17: note = Any amino acid
  VARIANT 18: note = Any amino acid
  VARIANT 19: note = Any amino acid
  VARIANT 20: note = Any amino acid
  VARIANT 21: note = Any amino acid
  VARIANT 22: note = Any amino acid
  VARIANT 23: note = Any amino acid
  VARIANT 24: note = Any amino acid
  VARIANT 25: note = Any amino acid
  VARIANT 26: note = Any amino acid
  VARIANT 27: note = Any amino acid
  VARIANT 28: note = Any amino acid
  VARIANT 29: note = Any amino acid
  VARIANT 30: note = Any amino acid
  VARIANT 31: note = Any amino acid
  VARIANT 32: note = Any amino acid
  VARIANT 33: note = Any amino acid
  VARIANT 34: note = Any amino acid
  VARIANT 35: note = Any amino acid
  VARIANT 36: note = Any amino acid
  VARIANT 37: note = Any amino acid
  VARIANT 38: note = Any amino acid
  VARIANT 39: note = Any amino acid
  VARIANT 40: note = Any amino acid
  VARIANT 41: note = Any amino acid
  VARIANT 42: note = Any amino acid
  VARIANT 43: note = Any amino acid
  VARIANT 44: note = Any amino acid
  VARIANT 46: note = Any amino acid
  VARIANT 47: note = Any amino acid
  VARIANT 48: note = Any amino acid
  VARIANT 49: note = Any amino acid
  VARIANT 50: note = Any amino acid
  VARIANT 51: note = Any amino acid
  VARIANT 52: note = Any amino acid
  VARIANT 53: note = Any amino acid
  VARIANT 54: note = Any amino acid
  VARIANT 55: note = Any amino acid
  VARIANT 56: note = Any amino acid
  VARIANT 57: note = Any amino acid
  VARIANT 58: note = Any amino acid
  VARIANT 59: note = Any amino acid
  VARIANT 60: note = Any amino acid
  VARIANT 61: note = Any amino acid
  VARIANT 62: note = Any amino acid
  VARIANT 63: note = Any amino acid
  VARIANT 64: note = Any amino acid
  VARIANT 65: note = Any amino acid
  VARIANT 66: note = Any amino acid
  VARIANT 67: note = Any amino acid
  VARIANT 68: note = Any amino acid
  VARIANT 69: note = Any amino acid
  VARIANT 70: note = Any amino acid
  VARIANT 71: note = Any amino acid
  VARIANT 72: note = Any amino acid
  VARIANT 73: note = Any amino acid
  VARIANT 74: note = Any amino acid
  VARIANT 75: note = Any amino acid
  VARIANT 76: note = Any amino acid
  VARIANT 77: note = Any amino acid
  VARIANT 78: note = Any amino acid
  VARIANT 79: note = Any amino acid
  VARIANT 80: note = Any amino acid
  VARIANT 82: note = Any amino acid
  VARIANT 84: note = Any amino acid
  VARIANT 85: note = Any amino acid
DXXXXXXXXXXXXXXXXXXXXXXXXXXXXXXXXXXXXXXXXXXXEXXXXXXXXXXXXXXXXXXXXXXXXXXXXXXXXXXXKXDXXD

SEQ ID NO: 796519 - protein, 83 aa, unidentified
  VARIANT 2: note = Any amino acid
  VARIANT 3: note = Any amino acid
  VARIANT 4: note = Any amino acid
  VARIANT 5: note = Any amino acid
  VARIANT 6: note = Any amino acid
  VARIANT 7: note = Any amino acid
  VARIANT 8: note = Any amino acid
  VARIANT 9: note = Any amino acid
  VARIANT 10: note = Any amino acid
  VARIANT 11: note = Any amino acid
  VARIANT 12: note = Any amino acid
  VARIANT 13: note = Any amino acid
  VARIANT 14: note = Any amino acid
  VARIANT 15: note = Any amino acid
  VARIANT 16: note = Any amino acid
  VARIANT 17: note = Any amino acid
  VARIANT 18: note = Any amino acid
  VARIANT 19: note = Any amino acid
  VARIANT 20: note = Any amino acid
  VARIANT 21: note = Any amino acid
  VARIANT 22: note = Any amino acid
  VARIANT 23: note = Any amino acid
  VARIANT 24: note = Any amino acid
  VARIANT 25: note = Any amino acid
  VARIANT 26: note = Any amino acid
  VARIANT 27: note = Any amino acid
  VARIANT 28: note = Any amino acid
  VARIANT 29: note = Any amino acid
  VARIANT 30: note = Any amino acid
  VARIANT 31: note = Any amino acid
  VARIANT 32: note = Any amino acid
  VARIANT 33: note = Any amino acid
  VARIANT 34: note = Any amino acid
  VARIANT 35: note = Any amino acid
  VARIANT 36: note = Any amino acid
  VARIANT 37: note = Any amino acid
  VARIANT 38: note = Any amino acid
  VARIANT 39: note = Any amino acid
  VARIANT 40: note = Any amino acid
  VARIANT 41: note = Any amino acid
  VARIANT 42: note = Any amino acid
  VARIANT 43: note = Any amino acid
  VARIANT 44: note = Any amino acid
  VARIANT 45: note = Any amino acid
  VARIANT 46: note = Any amino acid
  VARIANT 48: note = Any amino acid
  VARIANT 49: note = Any amino acid
  VARIANT 50: note = Any amino acid
  VARIANT 51: note = Any amino acid
  VARIANT 52: note = Any amino acid
  VARIANT 53: note = Any amino acid
  VARIANT 54: note = Any amino acid
  VARIANT 55: note = Any amino acid
  VARIANT 56: note = Any amino acid
  VARIANT 57: note = Any amino acid
  VARIANT 58: note = Any amino acid
  VARIANT 59: note = Any amino acid
  VARIANT 60: note = Any amino acid
  VARIANT 61: note = Any amino acid
  VARIANT 62: note = Any amino acid
  VARIANT 63: note = Any amino acid
  VARIANT 64: note = Any amino acid
  VARIANT 65: note = Any amino acid
  VARIANT 66: note = Any amino acid
  VARIANT 67: note = Any amino acid
  VARIANT 68: note = Any amino acid
  VARIANT 69: note = Any amino acid
  VARIANT 70: note = Any amino acid
  VARIANT 71: note = Any amino acid
  VARIANT 72: note = Any amino acid
  VARIANT 73: note = Any amino acid
  VARIANT 74: note = Any amino acid
  VARIANT 75: note = Any amino acid
  VARIANT 76: note = Any amino acid
  VARIANT 77: note = Any amino acid
  VARIANT 79: note = Any amino acid
  VARIANT 81: note = Any amino acid
  VARIANT 82: note = Any amino acid
DXXXXXXXXXXXXXXXXXXXXXXXXXXXXXXXXXXXXXXXXXXXXXEXXXXXXXXXXXXXXXXXXXXXXXXXXXXXXKXDXXD

SEQ ID NO: 796520 - protein, 83 aa, unidentified
  VARIANT 2: note = Any amino acid
  VARIANT 3: note = Any amino acid
  VARIANT 4: note = Any amino acid
  VARIANT 5: note = Any amino acid
  VARIANT 6: note = Any amino acid
  VARIANT 7: note = Any amino acid
  VARIANT 8: note = Any amino acid
  VARIANT 9: note = Any amino acid
  VARIANT 10: note = Any amino acid
  VARIANT 11: note = Any amino acid
  VARIANT 12: note = Any amino acid
  VARIANT 13: note = Any amino acid
  VARIANT 14: note = Any amino acid
  VARIANT 15: note = Any amino acid
  VARIANT 16: note = Any amino acid
  VARIANT 17: note = Any amino acid
  VARIANT 18: note = Any amino acid
  VARIANT 19: note = Any amino acid
  VARIANT 20: note = Any amino acid
  VARIANT 21: note = Any amino acid
  VARIANT 22: note = Any amino acid
  VARIANT 23: note = Any amino acid
  VARIANT 24: note = Any amino acid
  VARIANT 25: note = Any amino acid
  VARIANT 26: note = Any amino acid
  VARIANT 27: note = Any amino acid
  VARIANT 28: note = Any amino acid
  VARIANT 29: note = Any amino acid
  VARIANT 30: note = Any amino acid
  VARIANT 31: note = Any amino acid
  VARIANT 32: note = Any amino acid
  VARIANT 33: note = Any amino acid
  VARIANT 34: note = Any amino acid
  VARIANT 35: note = Any amino acid
  VARIANT 36: note = Any amino acid
  VARIANT 37: note = Any amino acid
  VARIANT 38: note = Any amino acid
  VARIANT 39: note = Any amino acid
  VARIANT 40: note = Any amino acid
  VARIANT 41: note = Any amino acid
  VARIANT 42: note = Any amino acid
  VARIANT 44: note = Any amino acid
  VARIANT 45: note = Any amino acid
  VARIANT 46: note = Any amino acid
  VARIANT 47: note = Any amino acid
  VARIANT 48: note = Any amino acid
  VARIANT 49: note = Any amino acid
  VARIANT 50: note = Any amino acid
  VARIANT 51: note = Any amino acid
  VARIANT 52: note = Any amino acid
  VARIANT 53: note = Any amino acid
  VARIANT 54: note = Any amino acid
  VARIANT 55: note = Any amino acid
  VARIANT 56: note = Any amino acid
  VARIANT 57: note = Any amino acid
  VARIANT 58: note = Any amino acid
  VARIANT 59: note = Any amino acid
  VARIANT 60: note = Any amino acid
  VARIANT 61: note = Any amino acid
  VARIANT 62: note = Any amino acid
  VARIANT 63: note = Any amino acid
  VARIANT 64: note = Any amino acid
  VARIANT 65: note = Any amino acid
  VARIANT 66: note = Any amino acid
  VARIANT 67: note = Any amino acid
  VARIANT 68: note = Any amino acid
  VARIANT 69: note = Any amino acid
  VARIANT 70: note = Any amino acid
  VARIANT 71: note = Any amino acid
  VARIANT 72: note = Any amino acid
  VARIANT 73: note = Any amino acid
  VARIANT 74: note = Any amino acid
  VARIANT 75: note = Any amino acid
  VARIANT 76: note = Any amino acid
  VARIANT 77: note = Any amino acid
  VARIANT 79: note = Any amino acid
  VARIANT 81: note = Any amino acid
  VARIANT 82: note = Any amino acid
DXXXXXXXXXXXXXXXXXXXXXXXXXXXXXXXXXXXXXXXXXEXXXXXXXXXXXXXXXXXXXXXXXXXXXXXXXXXXKXDXXD

SEQ ID NO: 796521 - protein, 89 aa, unidentified
  VARIANT 2: note = Any amino acid
  VARIANT 3: note = Any amino acid
  VARIANT 4: note = Any amino acid
  VARIANT 5: note = Any amino acid
  VARIANT 6: note = Any amino acid
  VARIANT 7: note = Any amino acid
  VARIANT 8: note = Any amino acid
  VARIANT 9: note = Any amino acid
  VARIANT 10: note = Any amino acid
  VARIANT 11: note = Any amino acid
  VARIANT 12: note = Any amino acid
  VARIANT 13: note = Any amino acid
  VARIANT 14: note = Any amino acid
  VARIANT 15: note = Any amino acid
  VARIANT 16: note = Any amino acid
  VARIANT 17: note = Any amino acid
  VARIANT 18: note = Any amino acid
  VARIANT 19: note = Any amino acid
  VARIANT 20: note = Any amino acid
  VARIANT 21: note = Any amino acid
  VARIANT 22: note = Any amino acid
  VARIANT 23: note = Any amino acid
  VARIANT 24: note = Any amino acid
  VARIANT 25: note = Any amino acid
  VARIANT 26: note = Any amino acid
  VARIANT 27: note = Any amino acid
  VARIANT 28: note = Any amino acid
  VARIANT 29: note = Any amino acid
  VARIANT 30: note = Any amino acid
  VARIANT 31: note = Any amino acid
  VARIANT 32: note = Any amino acid
  VARIANT 33: note = Any amino acid
  VARIANT 34: note = Any amino acid
  VARIANT 35: note = Any amino acid
  VARIANT 36: note = Any amino acid
  VARIANT 37: note = Any amino acid
  VARIANT 38: note = Any amino acid
  VARIANT 39: note = Any amino acid
  VARIANT 40: note = Any amino acid
  VARIANT 41: note = Any amino acid
  VARIANT 42: note = Any amino acid
  VARIANT 43: note = Any amino acid
  VARIANT 44: note = Any amino acid
  VARIANT 45: note = Any amino acid
  VARIANT 46: note = Any amino acid
  VARIANT 48: note = Any amino acid
  VARIANT 49: note = Any amino acid
  VARIANT 50: note = Any amino acid
  VARIANT 51: note = Any amino acid
  VARIANT 52: note = Any amino acid
  VARIANT 53: note = Any amino acid
  VARIANT 54: note = Any amino acid
  VARIANT 55: note = Any amino acid
  VARIANT 56: note = Any amino acid
  VARIANT 57: note = Any amino acid
  VARIANT 58: note = Any amino acid
  VARIANT 59: note = Any amino acid
  VARIANT 60: note = Any amino acid
  VARIANT 61: note = Any amino acid
  VARIANT 62: note = Any amino acid
  VARIANT 63: note = Any amino acid
  VARIANT 64: note = Any amino acid
  VARIANT 65: note = Any amino acid
  VARIANT 66: note = Any amino acid
  VARIANT 67: note = Any amino acid
  VARIANT 68: note = Any amino acid
  VARIANT 69: note = Any amino acid
  VARIANT 70: note = Any amino acid
  VARIANT 71: note = Any amino acid
  VARIANT 72: note = Any amino acid
  VARIANT 73: note = Any amino acid
  VARIANT 74: note = Any amino acid
  VARIANT 75: note = Any amino acid
  VARIANT 76: note = Any amino acid
  VARIANT 77: note = Any amino acid
  VARIANT 78: note = Any amino acid
  VARIANT 79: note = Any amino acid
  VARIANT 80: note = Any amino acid
  VARIANT 81: note = Any amino acid
  VARIANT 82: note = Any amino acid
  VARIANT 83: note = Any amino acid
  VARIANT 85: note = Any amino acid
  VARIANT 87: note = Any amino acid
  VARIANT 88: note = Any amino acid
DXXXXXXXXXXXXXXXXXXXXXXXXXXXXXXXXXXXXXXXXXXXXXYXXXXXXXXXXXXXXXXXXXXXXXXXXXXXXXXXXXXKXDXXD

SEQ ID NO: 796522 - protein, 90 aa, unidentified
  VARIANT 2: note = Any amino acid
  VARIANT 3: note = Any amino acid
  VARIANT 4: note = Any amino acid
  VARIANT 5: note = Any amino acid
  VARIANT 6: note = Any amino acid
  VARIANT 7: note = Any amino acid
  VARIANT 8: note = Any amino acid
  VARIANT 9: note = Any amino acid
  VARIANT 10: note = Any amino acid
  VARIANT 11: note = Any amino acid
  VARIANT 12: note = Any amino acid
  VARIANT 13: note = Any amino acid
  VARIANT 14: note = Any amino acid
  VARIANT 15: note = Any amino acid
  VARIANT 16: note = Any amino acid
  VARIANT 17: note = Any amino acid
  VARIANT 18: note = Any amino acid
  VARIANT 19: note = Any amino acid
  VARIANT 20: note = Any amino acid
  VARIANT 21: note = Any amino acid
  VARIANT 22: note = Any amino acid
  VARIANT 23: note = Any amino acid
  VARIANT 24: note = Any amino acid
  VARIANT 25: note = Any amino acid
  VARIANT 26: note = Any amino acid
  VARIANT 27: note = Any amino acid
  VARIANT 28: note = Any amino acid
  VARIANT 29: note = Any amino acid
  VARIANT 30: note = Any amino acid
  VARIANT 31: note = Any amino acid
  VARIANT 32: note = Any amino acid
  VARIANT 33: note = Any amino acid
  VARIANT 34: note = Any amino acid
  VARIANT 35: note = Any amino acid
  VARIANT 36: note = Any amino acid
  VARIANT 37: note = Any amino acid
  VARIANT 38: note = Any amino acid
  VARIANT 39: note = Any amino acid
  VARIANT 40: note = Any amino acid
  VARIANT 41: note = Any amino acid
  VARIANT 42: note = Any amino acid
  VARIANT 43: note = Any amino acid
  VARIANT 44: note = Any amino acid
  VARIANT 45: note = Any amino acid
  VARIANT 47: note = Any amino acid
  VARIANT 48: note = Any amino acid
  VARIANT 49: note = Any amino acid
  VARIANT 50: note = Any amino acid
  VARIANT 51: note = Any amino acid
  VARIANT 52: note = Any amino acid
  VARIANT 53: note = Any amino acid
  VARIANT 54: note = Any amino acid
  VARIANT 55: note = Any amino acid
  VARIANT 56: note = Any amino acid
  VARIANT 57: note = Any amino acid
  VARIANT 58: note = Any amino acid
  VARIANT 59: note = Any amino acid
  VARIANT 60: note = Any amino acid
  VARIANT 61: note = Any amino acid
  VARIANT 62: note = Any amino acid
  VARIANT 63: note = Any amino acid
  VARIANT 64: note = Any amino acid
  VARIANT 65: note = Any amino acid
  VARIANT 66: note = Any amino acid
  VARIANT 67: note = Any amino acid
  VARIANT 68: note = Any amino acid
  VARIANT 69: note = Any amino acid
  VARIANT 70: note = Any amino acid
  VARIANT 71: note = Any amino acid
  VARIANT 72: note = Any amino acid
  VARIANT 73: note = Any amino acid
  VARIANT 74: note = Any amino acid
  VARIANT 75: note = Any amino acid
  VARIANT 76: note = Any amino acid
  VARIANT 77: note = Any amino acid
  VARIANT 78: note = Any amino acid
  VARIANT 79: note = Any amino acid
  VARIANT 80: note = Any amino acid
  VARIANT 81: note = Any amino acid
  VARIANT 82: note = Any amino acid
  VARIANT 83: note = Any amino acid
  VARIANT 84: note = Any amino acid
  VARIANT 86: note = Any amino acid
  VARIANT 88: note = Any amino acid
  VARIANT 89: note = Any amino acid
DXXXXXXXXXXXXXXXXXXXXXXXXXXXXXXXXXXXXXXXXXXXXAXXXXXXXXXXXXXXXXXXXXXXXXXXXXXXXXXXXXXXKXDXXD

SEQ ID NO: 796523 - protein, 87 aa, unidentified
  VARIANT 2: note = Any amino acid
  VARIANT 3: note = Any amino acid
  VARIANT 4: note = Any amino acid
  VARIANT 5: note = Any amino acid
  VARIANT 6: note = Any amino acid
  VARIANT 7: note = Any amino acid
  VARIANT 8: note = Any amino acid
  VARIANT 9: note = Any amino acid
  VARIANT 10: note = Any amino acid
  VARIANT 11: note = Any amino acid
  VARIANT 12: note = Any amino acid
  VARIANT 13: note = Any amino acid
  VARIANT 14: note = Any amino acid
  VARIANT 15: note = Any amino acid
  VARIANT 16: note = Any amino acid
  VARIANT 17: note = Any amino acid
  VARIANT 18: note = Any amino acid
  VARIANT 19: note = Any amino acid
  VARIANT 20: note = Any amino acid
  VARIANT 21: note = Any amino acid
  VARIANT 22: note = Any amino acid
  VARIANT 23: note = Any amino acid
  VARIANT 24: note = Any amino acid
  VARIANT 25: note = Any amino acid
  VARIANT 26: note = Any amino acid
  VARIANT 27: note = Any amino acid
  VARIANT 28: note = Any amino acid
  VARIANT 29: note = Any amino acid
  VARIANT 30: note = Any amino acid
  VARIANT 31: note = Any amino acid
  VARIANT 32: note = Any amino acid
  VARIANT 33: note = Any amino acid
  VARIANT 34: note = Any amino acid
  VARIANT 35: note = Any amino acid
  VARIANT 36: note = Any amino acid
  VARIANT 37: note = Any amino acid
  VARIANT 38: note = Any amino acid
  VARIANT 39: note = Any amino acid
  VARIANT 40: note = Any amino acid
  VARIANT 41: note = Any amino acid
  VARIANT 42: note = Any amino acid
  VARIANT 43: note = Any amino acid
  VARIANT 44: note = Any amino acid
  VARIANT 46: note = Any amino acid
  VARIANT 47: note = Any amino acid
  VARIANT 48: note = Any amino acid
  VARIANT 49: note = Any amino acid
  VARIANT 50: note = Any amino acid
  VARIANT 51: note = Any amino acid
  VARIANT 52: note = Any amino acid
  VARIANT 53: note = Any amino acid
  VARIANT 54: note = Any amino acid
  VARIANT 55: note = Any amino acid
  VARIANT 56: note = Any amino acid
  VARIANT 57: note = Any amino acid
  VARIANT 58: note = Any amino acid
  VARIANT 59: note = Any amino acid
  VARIANT 60: note = Any amino acid
  VARIANT 61: note = Any amino acid
  VARIANT 62: note = Any amino acid
  VARIANT 63: note = Any amino acid
  VARIANT 64: note = Any amino acid
  VARIANT 65: note = Any amino acid
  VARIANT 66: note = Any amino acid
  VARIANT 67: note = Any amino acid
  VARIANT 68: note = Any amino acid
  VARIANT 69: note = Any amino acid
  VARIANT 70: note = Any amino acid
  VARIANT 71: note = Any amino acid
  VARIANT 72: note = Any amino acid
  VARIANT 73: note = Any amino acid
  VARIANT 74: note = Any amino acid
  VARIANT 75: note = Any amino acid
  VARIANT 76: note = Any amino acid
  VARIANT 77: note = Any amino acid
  VARIANT 78: note = Any amino acid
  VARIANT 79: note = Any amino acid
  VARIANT 80: note = Any amino acid
  VARIANT 81: note = Any amino acid
  VARIANT 83: note = Any amino acid
  VARIANT 85: note = Any amino acid
  VARIANT 86: note = Any amino acid
DXXXXXXXXXXXXXXXXXXXXXXXXXXXXXXXXXXXXXXXXXXXEXXXXXXXXXXXXXXXXXXXXXXXXXXXXXXXXXXXXKXDXXD

SEQ ID NO: 796524 - protein, 90 aa, unidentified
  VARIANT 2: note = Any amino acid
  VARIANT 3: note = Any amino acid
  VARIANT 4: note = Any amino acid
  VARIANT 5: note = Any amino acid
  VARIANT 6: note = Any amino acid
  VARIANT 7: note = Any amino acid
  VARIANT 8: note = Any amino acid
  VARIANT 9: note = Any amino acid
  VARIANT 10: note = Any amino acid
  VARIANT 11: note = Any amino acid
  VARIANT 12: note = Any amino acid
  VARIANT 13: note = Any amino acid
  VARIANT 14: note = Any amino acid
  VARIANT 15: note = Any amino acid
  VARIANT 16: note = Any amino acid
  VARIANT 17: note = Any amino acid
  VARIANT 18: note = Any amino acid
  VARIANT 19: note = Any amino acid
  VARIANT 20: note = Any amino acid
  VARIANT 21: note = Any amino acid
  VARIANT 22: note = Any amino acid
  VARIANT 23: note = Any amino acid
  VARIANT 24: note = Any amino acid
  VARIANT 25: note = Any amino acid
  VARIANT 26: note = Any amino acid
  VARIANT 27: note = Any amino acid
  VARIANT 28: note = Any amino acid
  VARIANT 29: note = Any amino acid
  VARIANT 30: note = Any amino acid
  VARIANT 31: note = Any amino acid
  VARIANT 32: note = Any amino acid
  VARIANT 33: note = Any amino acid
  VARIANT 34: note = Any amino acid
  VARIANT 35: note = Any amino acid
  VARIANT 36: note = Any amino acid
  VARIANT 37: note = Any amino acid
  VARIANT 38: note = Any amino acid
  VARIANT 39: note = Any amino acid
  VARIANT 40: note = Any amino acid
  VARIANT 41: note = Any amino acid
  VARIANT 42: note = Any amino acid
  VARIANT 43: note = Any amino acid
  VARIANT 44: note = Any amino acid
  VARIANT 45: note = Any amino acid
  VARIANT 46: note = Any amino acid
  VARIANT 48: note = Any amino acid
  VARIANT 49: note = Any amino acid
  VARIANT 50: note = Any amino acid
  VARIANT 51: note = Any amino acid
  VARIANT 52: note = Any amino acid
  VARIANT 53: note = Any amino acid
  VARIANT 54: note = Any amino acid
  VARIANT 55: note = Any amino acid
  VARIANT 56: note = Any amino acid
  VARIANT 57: note = Any amino acid
  VARIANT 58: note = Any amino acid
  VARIANT 59: note = Any amino acid
  VARIANT 60: note = Any amino acid
  VARIANT 61: note = Any amino acid
  VARIANT 62: note = Any amino acid
  VARIANT 63: note = Any amino acid
  VARIANT 64: note = Any amino acid
  VARIANT 65: note = Any amino acid
  VARIANT 66: note = Any amino acid
  VARIANT 67: note = Any amino acid
  VARIANT 68: note = Any amino acid
  VARIANT 69: note = Any amino acid
  VARIANT 70: note = Any amino acid
  VARIANT 71: note = Any amino acid
  VARIANT 72: note = Any amino acid
  VARIANT 73: note = Any amino acid
  VARIANT 74: note = Any amino acid
  VARIANT 75: note = Any amino acid
  VARIANT 76: note = Any amino acid
  VARIANT 77: note = Any amino acid
  VARIANT 78: note = Any amino acid
  VARIANT 79: note = Any amino acid
  VARIANT 80: note = Any amino acid
  VARIANT 81: note = Any amino acid
  VARIANT 82: note = Any amino acid
  VARIANT 83: note = Any amino acid
  VARIANT 84: note = Any amino acid
  VARIANT 86: note = Any amino acid
  VARIANT 88: note = Any amino acid
  VARIANT 89: note = Any amino acid
DXXXXXXXXXXXXXXXXXXXXXXXXXXXXXXXXXXXXXXXXXXXXXLXXXXXXXXXXXXXXXXXXXXXXXXXXXXXXXXXXXXXKXDXXD

SEQ ID NO: 796525 - protein, 90 aa, unidentified
  VARIANT 2: note = Any amino acid
  VARIANT 3: note = Any amino acid
  VARIANT 4: note = Any amino acid
  VARIANT 5: note = Any amino acid
  VARIANT 6: note = Any amino acid
  VARIANT 7: note = Any amino acid
  VARIANT 8: note = Any amino acid
  VARIANT 9: note = Any amino acid
  VARIANT 10: note = Any amino acid
  VARIANT 11: note = Any amino acid
  VARIANT 12: note = Any amino acid
  VARIANT 13: note = Any amino acid
  VARIANT 14: note = Any amino acid
  VARIANT 15: note = Any amino acid
  VARIANT 16: note = Any amino acid
  VARIANT 17: note = Any amino acid
  VARIANT 18: note = Any amino acid
  VARIANT 19: note = Any amino acid
  VARIANT 20: note = Any amino acid
  VARIANT 21: note = Any amino acid
  VARIANT 22: note = Any amino acid
  VARIANT 23: note = Any amino acid
  VARIANT 24: note = Any amino acid
  VARIANT 25: note = Any amino acid
  VARIANT 26: note = Any amino acid
  VARIANT 27: note = Any amino acid
  VARIANT 28: note = Any amino acid
  VARIANT 29: note = Any amino acid
  VARIANT 30: note = Any amino acid
  VARIANT 31: note = Any amino acid
  VARIANT 32: note = Any amino acid
  VARIANT 33: note = Any amino acid
  VARIANT 34: note = Any amino acid
  VARIANT 35: note = Any amino acid
  VARIANT 36: note = Any amino acid
  VARIANT 37: note = Any amino acid
  VARIANT 38: note = Any amino acid
  VARIANT 39: note = Any amino acid
  VARIANT 40: note = Any amino acid
  VARIANT 41: note = Any amino acid
  VARIANT 42: note = Any amino acid
  VARIANT 43: note = Any amino acid
  VARIANT 44: note = Any amino acid
  VARIANT 45: note = Any amino acid
  VARIANT 46: note = Any amino acid
  VARIANT 47: note = Any amino acid
  VARIANT 49: note = Any amino acid
  VARIANT 50: note = Any amino acid
  VARIANT 51: note = Any amino acid
  VARIANT 52: note = Any amino acid
  VARIANT 53: note = Any amino acid
  VARIANT 54: note = Any amino acid
  VARIANT 55: note = Any amino acid
  VARIANT 56: note = Any amino acid
  VARIANT 57: note = Any amino acid
  VARIANT 58: note = Any amino acid
  VARIANT 59: note = Any amino acid
  VARIANT 60: note = Any amino acid
  VARIANT 61: note = Any amino acid
  VARIANT 62: note = Any amino acid
  VARIANT 63: note = Any amino acid
  VARIANT 64: note = Any amino acid
  VARIANT 65: note = Any amino acid
  VARIANT 66: note = Any amino acid
  VARIANT 67: note = Any amino acid
  VARIANT 68: note = Any amino acid
  VARIANT 69: note = Any amino acid
  VARIANT 70: note = Any amino acid
  VARIANT 71: note = Any amino acid
  VARIANT 72: note = Any amino acid
  VARIANT 73: note = Any amino acid
  VARIANT 74: note = Any amino acid
  VARIANT 75: note = Any amino acid
  VARIANT 76: note = Any amino acid
  VARIANT 77: note = Any amino acid
  VARIANT 78: note = Any amino acid
  VARIANT 79: note = Any amino acid
  VARIANT 80: note = Any amino acid
  VARIANT 81: note = Any amino acid
  VARIANT 82: note = Any amino acid
  VARIANT 83: note = Any amino acid
  VARIANT 84: note = Any amino acid
  VARIANT 86: note = Any amino acid
  VARIANT 88: note = Any amino acid
  VARIANT 89: note = Any amino acid
DXXXXXXXXXXXXXXXXXXXXXXXXXXXXXXXXXXXXXXXXXXXXXXYXXXXXXXXXXXXXXXXXXXXXXXXXXXXXXXXXXXXKXDXXD

SEQ ID NO: 796526 - protein, 96 aa, unidentified
  VARIANT 2: note = Any amino acid
  VARIANT 3: note = Any amino acid
  VARIANT 4: note = Any amino acid
  VARIANT 5: note = Any amino acid
  VARIANT 6: note = Any amino acid
  VARIANT 7: note = Any amino acid
  VARIANT 8: note = Any amino acid
  VARIANT 9: note = Any amino acid
  VARIANT 10: note = Any amino acid
  VARIANT 11: note = Any amino acid
  VARIANT 12: note = Any amino acid
  VARIANT 13: note = Any amino acid
  VARIANT 14: note = Any amino acid
  VARIANT 15: note = Any amino acid
  VARIANT 16: note = Any amino acid
  VARIANT 17: note = Any amino acid
  VARIANT 18: note = Any amino acid
  VARIANT 19: note = Any amino acid
  VARIANT 20: note = Any amino acid
  VARIANT 21: note = Any amino acid
  VARIANT 22: note = Any amino acid
  VARIANT 23: note = Any amino acid
  VARIANT 24: note = Any amino acid
  VARIANT 25: note = Any amino acid
  VARIANT 26: note = Any amino acid
  VARIANT 27: note = Any amino acid
  VARIANT 28: note = Any amino acid
  VARIANT 29: note = Any amino acid
  VARIANT 30: note = Any amino acid
  VARIANT 31: note = Any amino acid
  VARIANT 32: note = Any amino acid
  VARIANT 33: note = Any amino acid
  VARIANT 34: note = Any amino acid
  VARIANT 35: note = Any amino acid
  VARIANT 36: note = Any amino acid
  VARIANT 37: note = Any amino acid
  VARIANT 38: note = Any amino acid
  VARIANT 39: note = Any amino acid
  VARIANT 40: note = Any amino acid
  VARIANT 41: note = Any amino acid
  VARIANT 42: note = Any amino acid
  VARIANT 43: note = Any amino acid
  VARIANT 44: note = Any amino acid
  VARIANT 45: note = Any amino acid
  VARIANT 46: note = Any amino acid
  VARIANT 47: note = Any amino acid
  VARIANT 48: note = Any amino acid
  VARIANT 49: note = Any amino acid
  VARIANT 50: note = Any amino acid
  VARIANT 51: note = Any amino acid
  VARIANT 53: note = Any amino acid
  VARIANT 54: note = Any amino acid
  VARIANT 55: note = Any amino acid
  VARIANT 56: note = Any amino acid
  VARIANT 57: note = Any amino acid
  VARIANT 58: note = Any amino acid
  VARIANT 59: note = Any amino acid
  VARIANT 60: note = Any amino acid
  VARIANT 61: note = Any amino acid
  VARIANT 62: note = Any amino acid
  VARIANT 63: note = Any amino acid
  VARIANT 64: note = Any amino acid
  VARIANT 65: note = Any amino acid
  VARIANT 66: note = Any amino acid
  VARIANT 67: note = Any amino acid
  VARIANT 68: note = Any amino acid
  VARIANT 69: note = Any amino acid
  VARIANT 70: note = Any amino acid
  VARIANT 71: note = Any amino acid
  VARIANT 72: note = Any amino acid
  VARIANT 73: note = Any amino acid
  VARIANT 74: note = Any amino acid
  VARIANT 75: note = Any amino acid
  VARIANT 76: note = Any amino acid
  VARIANT 77: note = Any amino acid
  VARIANT 78: note = Any amino acid
  VARIANT 79: note = Any amino acid
  VARIANT 80: note = Any amino acid
  VARIANT 81: note = Any amino acid
  VARIANT 82: note = Any amino acid
  VARIANT 83: note = Any amino acid
  VARIANT 84: note = Any amino acid
  VARIANT 85: note = Any amino acid
  VARIANT 86: note = Any amino acid
  VARIANT 87: note = Any amino acid
  VARIANT 88: note = Any amino acid
  VARIANT 89: note = Any amino acid
  VARIANT 90: note = Any amino acid
  VARIANT 92: note = Any amino acid
  VARIANT 94: note = Any amino acid
  VARIANT 95: note = Any amino acid
DXXXXXXXXXXXXXXXXXXXXXXXXXXXXXXXXXXXXXXXXXXXXXXXXXXAXXXXXXXXXXXXXXXXXXXXXXXXXXXXXXXXXXXXXXKXDXXD

SEQ ID NO: 796527 - protein, 90 aa, unidentified
  VARIANT 2: note = Any amino acid
  VARIANT 3: note = Any amino acid
  VARIANT 4: note = Any amino acid
  VARIANT 5: note = Any amino acid
  VARIANT 6: note = Any amino acid
  VARIANT 7: note = Any amino acid
  VARIANT 8: note = Any amino acid
  VARIANT 9: note = Any amino acid
  VARIANT 10: note = Any amino acid
  VARIANT 11: note = Any amino acid
  VARIANT 12: note = Any amino acid
  VARIANT 13: note = Any amino acid
  VARIANT 14: note = Any amino acid
  VARIANT 15: note = Any amino acid
  VARIANT 16: note = Any amino acid
  VARIANT 17: note = Any amino acid
  VARIANT 18: note = Any amino acid
  VARIANT 19: note = Any amino acid
  VARIANT 20: note = Any amino acid
  VARIANT 21: note = Any amino acid
  VARIANT 22: note = Any amino acid
  VARIANT 23: note = Any amino acid
  VARIANT 24: note = Any amino acid
  VARIANT 25: note = Any amino acid
  VARIANT 26: note = Any amino acid
  VARIANT 27: note = Any amino acid
  VARIANT 28: note = Any amino acid
  VARIANT 29: note = Any amino acid
  VARIANT 30: note = Any amino acid
  VARIANT 31: note = Any amino acid
  VARIANT 32: note = Any amino acid
  VARIANT 33: note = Any amino acid
  VARIANT 34: note = Any amino acid
  VARIANT 35: note = Any amino acid
  VARIANT 36: note = Any amino acid
  VARIANT 37: note = Any amino acid
  VARIANT 38: note = Any amino acid
  VARIANT 39: note = Any amino acid
  VARIANT 40: note = Any amino acid
  VARIANT 41: note = Any amino acid
  VARIANT 42: note = Any amino acid
  VARIANT 43: note = Any amino acid
  VARIANT 44: note = Any amino acid
  VARIANT 45: note = Any amino acid
  VARIANT 46: note = Any amino acid
  VARIANT 47: note = Any amino acid
  VARIANT 48: note = Any amino acid
  VARIANT 49: note = Any amino acid
  VARIANT 50: note = Any amino acid
  VARIANT 51: note = Any amino acid
  VARIANT 52: note = Any amino acid
  VARIANT 54: note = Any amino acid
  VARIANT 55: note = Any amino acid
  VARIANT 56: note = Any amino acid
  VARIANT 57: note = Any amino acid
  VARIANT 58: note = Any amino acid
  VARIANT 59: note = Any amino acid
  VARIANT 60: note = Any amino acid
  VARIANT 61: note = Any amino acid
  VARIANT 62: note = Any amino acid
  VARIANT 63: note = Any amino acid
  VARIANT 64: note = Any amino acid
  VARIANT 65: note = Any amino acid
  VARIANT 66: note = Any amino acid
  VARIANT 67: note = Any amino acid
  VARIANT 68: note = Any amino acid
  VARIANT 69: note = Any amino acid
  VARIANT 70: note = Any amino acid
  VARIANT 71: note = Any amino acid
  VARIANT 72: note = Any amino acid
  VARIANT 73: note = Any amino acid
  VARIANT 74: note = Any amino acid
  VARIANT 75: note = Any amino acid
  VARIANT 76: note = Any amino acid
  VARIANT 77: note = Any amino acid
  VARIANT 78: note = Any amino acid
  VARIANT 79: note = Any amino acid
  VARIANT 80: note = Any amino acid
  VARIANT 81: note = Any amino acid
  VARIANT 82: note = Any amino acid
  VARIANT 83: note = Any amino acid
  VARIANT 84: note = Any amino acid
  VARIANT 86: note = Any amino acid
  VARIANT 88: note = Any amino acid
  VARIANT 89: note = Any amino acid
DXXXXXXXXXXXXXXXXXXXXXXXXXXXXXXXXXXXXXXXXXXXXXXXXXXXEXXXXXXXXXXXXXXXXXXXXXXXXXXXXXXXKXDXXD

SEQ ID NO: 796528 - protein, 95 aa, unidentified
  VARIANT 2: note = Any amino acid
  VARIANT 3: note = Any amino acid
  VARIANT 4: note = Any amino acid
  VARIANT 5: note = Any amino acid
  VARIANT 6: note = Any amino acid
  VARIANT 7: note = Any amino acid
  VARIANT 8: note = Any amino acid
  VARIANT 9: note = Any amino acid
  VARIANT 10: note = Any amino acid
  VARIANT 11: note = Any amino acid
  VARIANT 12: note = Any amino acid
  VARIANT 13: note = Any amino acid
  VARIANT 14: note = Any amino acid
  VARIANT 15: note = Any amino acid
  VARIANT 16: note = Any amino acid
  VARIANT 17: note = Any amino acid
  VARIANT 18: note = Any amino acid
  VARIANT 19: note = Any amino acid
  VARIANT 20: note = Any amino acid
  VARIANT 21: note = Any amino acid
  VARIANT 22: note = Any amino acid
  VARIANT 23: note = Any amino acid
  VARIANT 24: note = Any amino acid
  VARIANT 25: note = Any amino acid
  VARIANT 26: note = Any amino acid
  VARIANT 27: note = Any amino acid
  VARIANT 28: note = Any amino acid
  VARIANT 29: note = Any amino acid
  VARIANT 30: note = Any amino acid
  VARIANT 31: note = Any amino acid
  VARIANT 32: note = Any amino acid
  VARIANT 33: note = Any amino acid
  VARIANT 34: note = Any amino acid
  VARIANT 35: note = Any amino acid
  VARIANT 36: note = Any amino acid
  VARIANT 37: note = Any amino acid
  VARIANT 38: note = Any amino acid
  VARIANT 39: note = Any amino acid
  VARIANT 40: note = Any amino acid
  VARIANT 41: note = Any amino acid
  VARIANT 42: note = Any amino acid
  VARIANT 43: note = Any amino acid
  VARIANT 44: note = Any amino acid
  VARIANT 45: note = Any amino acid
  VARIANT 46: note = Any amino acid
  VARIANT 47: note = Any amino acid
  VARIANT 48: note = Any amino acid
  VARIANT 49: note = Any amino acid
  VARIANT 50: note = Any amino acid
  VARIANT 51: note = Any amino acid
  VARIANT 53: note = Any amino acid
  VARIANT 54: note = Any amino acid
  VARIANT 55: note = Any amino acid
  VARIANT 56: note = Any amino acid
  VARIANT 57: note = Any amino acid
  VARIANT 58: note = Any amino acid
  VARIANT 59: note = Any amino acid
  VARIANT 60: note = Any amino acid
  VARIANT 61: note = Any amino acid
  VARIANT 62: note = Any amino acid
  VARIANT 63: note = Any amino acid
  VARIANT 64: note = Any amino acid
  VARIANT 65: note = Any amino acid
  VARIANT 66: note = Any amino acid
  VARIANT 67: note = Any amino acid
  VARIANT 68: note = Any amino acid
  VARIANT 69: note = Any amino acid
  VARIANT 70: note = Any amino acid
  VARIANT 71: note = Any amino acid
  VARIANT 72: note = Any amino acid
  VARIANT 73: note = Any amino acid
  VARIANT 74: note = Any amino acid
  VARIANT 75: note = Any amino acid
  VARIANT 76: note = Any amino acid
  VARIANT 77: note = Any amino acid
  VARIANT 78: note = Any amino acid
  VARIANT 79: note = Any amino acid
  VARIANT 80: note = Any amino acid
  VARIANT 81: note = Any amino acid
  VARIANT 82: note = Any amino acid
  VARIANT 83: note = Any amino acid
  VARIANT 84: note = Any amino acid
  VARIANT 85: note = Any amino acid
  VARIANT 86: note = Any amino acid
  VARIANT 87: note = Any amino acid
  VARIANT 88: note = Any amino acid
  VARIANT 89: note = Any amino acid
  VARIANT 91: note = Any amino acid
  VARIANT 93: note = Any amino acid
  VARIANT 94: note = Any amino acid
DXXXXXXXXXXXXXXXXXXXXXXXXXXXXXXXXXXXXXXXXXXXXXXXXXXGXXXXXXXXXXXXXXXXXXXXXXXXXXXXXXXXXXXXXKXDXXD

SEQ ID NO: 796529 - protein, 91 aa, unidentified
  VARIANT 2: note = Any amino acid
  VARIANT 3: note = Any amino acid
  VARIANT 4: note = Any amino acid
  VARIANT 5: note = Any amino acid
  VARIANT 6: note = Any amino acid
  VARIANT 7: note = Any amino acid
  VARIANT 8: note = Any amino acid
  VARIANT 9: note = Any amino acid
  VARIANT 10: note = Any amino acid
  VARIANT 11: note = Any amino acid
  VARIANT 12: note = Any amino acid
  VARIANT 13: note = Any amino acid
  VARIANT 14: note = Any amino acid
  VARIANT 15: note = Any amino acid
  VARIANT 16: note = Any amino acid
  VARIANT 17: note = Any amino acid
  VARIANT 18: note = Any amino acid
  VARIANT 19: note = Any amino acid
  VARIANT 20: note = Any amino acid
  VARIANT 21: note = Any amino acid
  VARIANT 22: note = Any amino acid
  VARIANT 23: note = Any amino acid
  VARIANT 24: note = Any amino acid
  VARIANT 25: note = Any amino acid
  VARIANT 26: note = Any amino acid
  VARIANT 27: note = Any amino acid
  VARIANT 28: note = Any amino acid
  VARIANT 29: note = Any amino acid
  VARIANT 30: note = Any amino acid
  VARIANT 31: note = Any amino acid
  VARIANT 32: note = Any amino acid
  VARIANT 33: note = Any amino acid
  VARIANT 34: note = Any amino acid
  VARIANT 35: note = Any amino acid
  VARIANT 36: note = Any amino acid
  VARIANT 37: note = Any amino acid
  VARIANT 38: note = Any amino acid
  VARIANT 39: note = Any amino acid
  VARIANT 40: note = Any amino acid
  VARIANT 41: note = Any amino acid
  VARIANT 42: note = Any amino acid
  VARIANT 43: note = Any amino acid
  VARIANT 44: note = Any amino acid
  VARIANT 45: note = Any amino acid
  VARIANT 46: note = Any amino acid
  VARIANT 47: note = Any amino acid
  VARIANT 48: note = Any amino acid
  VARIANT 50: note = Any amino acid
  VARIANT 51: note = Any amino acid
  VARIANT 52: note = Any amino acid
  VARIANT 53: note = Any amino acid
  VARIANT 54: note = Any amino acid
  VARIANT 55: note = Any amino acid
  VARIANT 56: note = Any amino acid
  VARIANT 57: note = Any amino acid
  VARIANT 58: note = Any amino acid
  VARIANT 59: note = Any amino acid
  VARIANT 60: note = Any amino acid
  VARIANT 61: note = Any amino acid
  VARIANT 62: note = Any amino acid
  VARIANT 63: note = Any amino acid
  VARIANT 64: note = Any amino acid
  VARIANT 65: note = Any amino acid
  VARIANT 66: note = Any amino acid
  VARIANT 67: note = Any amino acid
  VARIANT 68: note = Any amino acid
  VARIANT 69: note = Any amino acid
  VARIANT 70: note = Any amino acid
  VARIANT 71: note = Any amino acid
  VARIANT 72: note = Any amino acid
  VARIANT 73: note = Any amino acid
  VARIANT 74: note = Any amino acid
  VARIANT 75: note = Any amino acid
  VARIANT 76: note = Any amino acid
  VARIANT 77: note = Any amino acid
  VARIANT 78: note = Any amino acid
  VARIANT 79: note = Any amino acid
  VARIANT 80: note = Any amino acid
  VARIANT 81: note = Any amino acid
  VARIANT 82: note = Any amino acid
  VARIANT 83: note = Any amino acid
  VARIANT 84: note = Any amino acid
  VARIANT 85: note = Any amino acid
  VARIANT 87: note = Any amino acid
  VARIANT 89: note = Any amino acid
  VARIANT 90: note = Any amino acid
DXXXXXXXXXXXXXXXXXXXXXXXXXXXXXXXXXXXXXXXXXXXXXXXYXXXXXXXXXXXXXXXXXXXXXXXXXXXXXXXXXXXXKXDXXD

SEQ ID NO: 796530 - protein, 91 aa, unidentified
  VARIANT 2: note = Any amino acid
  VARIANT 3: note = Any amino acid
  VARIANT 4: note = Any amino acid
  VARIANT 5: note = Any amino acid
  VARIANT 6: note = Any amino acid
  VARIANT 7: note = Any amino acid
  VARIANT 8: note = Any amino acid
  VARIANT 9: note = Any amino acid
  VARIANT 10: note = Any amino acid
  VARIANT 11: note = Any amino acid
  VARIANT 12: note = Any amino acid
  VARIANT 13: note = Any amino acid
  VARIANT 14: note = Any amino acid
  VARIANT 15: note = Any amino acid
  VARIANT 16: note = Any amino acid
  VARIANT 17: note = Any amino acid
  VARIANT 18: note = Any amino acid
  VARIANT 19: note = Any amino acid
  VARIANT 20: note = Any amino acid
  VARIANT 21: note = Any amino acid
  VARIANT 22: note = Any amino acid
  VARIANT 23: note = Any amino acid
  VARIANT 24: note = Any amino acid
  VARIANT 25: note = Any amino acid
  VARIANT 26: note = Any amino acid
  VARIANT 27: note = Any amino acid
  VARIANT 28: note = Any amino acid
  VARIANT 29: note = Any amino acid
  VARIANT 30: note = Any amino acid
  VARIANT 31: note = Any amino acid
  VARIANT 32: note = Any amino acid
  VARIANT 33: note = Any amino acid
  VARIANT 34: note = Any amino acid
  VARIANT 35: note = Any amino acid
  VARIANT 36: note = Any amino acid
  VARIANT 37: note = Any amino acid
  VARIANT 38: note = Any amino acid
  VARIANT 39: note = Any amino acid
  VARIANT 40: note = Any amino acid
  VARIANT 41: note = Any amino acid
  VARIANT 42: note = Any amino acid
  VARIANT 43: note = Any amino acid
  VARIANT 44: note = Any amino acid
  VARIANT 45: note = Any amino acid
  VARIANT 46: note = Any amino acid
  VARIANT 47: note = Any amino acid
  VARIANT 49: note = Any amino acid
  VARIANT 50: note = Any amino acid
  VARIANT 51: note = Any amino acid
  VARIANT 52: note = Any amino acid
  VARIANT 53: note = Any amino acid
  VARIANT 54: note = Any amino acid
  VARIANT 55: note = Any amino acid
  VARIANT 56: note = Any amino acid
  VARIANT 57: note = Any amino acid
  VARIANT 58: note = Any amino acid
  VARIANT 59: note = Any amino acid
  VARIANT 60: note = Any amino acid
  VARIANT 61: note = Any amino acid
  VARIANT 62: note = Any amino acid
  VARIANT 63: note = Any amino acid
  VARIANT 64: note = Any amino acid
  VARIANT 65: note = Any amino acid
  VARIANT 66: note = Any amino acid
  VARIANT 67: note = Any amino acid
  VARIANT 68: note = Any amino acid
  VARIANT 69: note = Any amino acid
  VARIANT 70: note = Any amino acid
  VARIANT 71: note = Any amino acid
  VARIANT 72: note = Any amino acid
  VARIANT 73: note = Any amino acid
  VARIANT 74: note = Any amino acid
  VARIANT 75: note = Any amino acid
  VARIANT 76: note = Any amino acid
  VARIANT 77: note = Any amino acid
  VARIANT 78: note = Any amino acid
  VARIANT 79: note = Any amino acid
  VARIANT 80: note = Any amino acid
  VARIANT 81: note = Any amino acid
  VARIANT 82: note = Any amino acid
  VARIANT 83: note = Any amino acid
  VARIANT 84: note = Any amino acid
  VARIANT 85: note = Any amino acid
  VARIANT 87: note = Any amino acid
  VARIANT 89: note = Any amino acid
  VARIANT 90: note = Any amino acid
DXXXXXXXXXXXXXXXXXXXXXXXXXXXXXXXXXXXXXXXXXXXXXXEXXXXXXXXXXXXXXXXXXXXXXXXXXXXXXXXXXXXXKXNXXD

SEQ ID NO: 796531 - protein, 94 aa, unidentified
  VARIANT 2: note = Any amino acid
  VARIANT 3: note = Any amino acid
  VARIANT 4: note = Any amino acid
  VARIANT 5: note = Any amino acid
  VARIANT 6: note = Any amino acid
  VARIANT 7: note = Any amino acid
  VARIANT 8: note = Any amino acid
  VARIANT 9: note = Any amino acid
  VARIANT 10: note = Any amino acid
  VARIANT 11: note = Any amino acid
  VARIANT 12: note = Any amino acid
  VARIANT 13: note = Any amino acid
  VARIANT 14: note = Any amino acid
  VARIANT 15: note = Any amino acid
  VARIANT 16: note = Any amino acid
  VARIANT 17: note = Any amino acid
  VARIANT 18: note = Any amino acid
  VARIANT 19: note = Any amino acid
  VARIANT 20: note = Any amino acid
  VARIANT 21: note = Any amino acid
  VARIANT 22: note = Any amino acid
  VARIANT 23: note = Any amino acid
  VARIANT 24: note = Any amino acid
  VARIANT 25: note = Any amino acid
  VARIANT 26: note = Any amino acid
  VARIANT 27: note = Any amino acid
  VARIANT 28: note = Any amino acid
  VARIANT 29: note = Any amino acid
  VARIANT 30: note = Any amino acid
  VARIANT 31: note = Any amino acid
  VARIANT 32: note = Any amino acid
  VARIANT 33: note = Any amino acid
  VARIANT 34: note = Any amino acid
  VARIANT 35: note = Any amino acid
  VARIANT 36: note = Any amino acid
  VARIANT 37: note = Any amino acid
  VARIANT 38: note = Any amino acid
  VARIANT 39: note = Any amino acid
  VARIANT 40: note = Any amino acid
  VARIANT 41: note = Any amino acid
  VARIANT 42: note = Any amino acid
  VARIANT 43: note = Any amino acid
  VARIANT 44: note = Any amino acid
  VARIANT 45: note = Any amino acid
  VARIANT 46: note = Any amino acid
  VARIANT 47: note = Any amino acid
  VARIANT 48: note = Any amino acid
  VARIANT 49: note = Any amino acid
  VARIANT 50: note = Any amino acid
  VARIANT 51: note = Any amino acid
  VARIANT 53: note = Any amino acid
  VARIANT 54: note = Any amino acid
  VARIANT 55: note = Any amino acid
  VARIANT 56: note = Any amino acid
  VARIANT 57: note = Any amino acid
  VARIANT 58: note = Any amino acid
  VARIANT 59: note = Any amino acid
  VARIANT 60: note = Any amino acid
  VARIANT 61: note = Any amino acid
  VARIANT 62: note = Any amino acid
  VARIANT 63: note = Any amino acid
  VARIANT 64: note = Any amino acid
  VARIANT 65: note = Any amino acid
  VARIANT 66: note = Any amino acid
  VARIANT 67: note = Any amino acid
  VARIANT 68: note = Any amino acid
  VARIANT 69: note = Any amino acid
  VARIANT 70: note = Any amino acid
  VARIANT 71: note = Any amino acid
  VARIANT 72: note = Any amino acid
  VARIANT 73: note = Any amino acid
  VARIANT 74: note = Any amino acid
  VARIANT 75: note = Any amino acid
  VARIANT 76: note = Any amino acid
  VARIANT 77: note = Any amino acid
  VARIANT 78: note = Any amino acid
  VARIANT 79: note = Any amino acid
  VARIANT 80: note = Any amino acid
  VARIANT 81: note = Any amino acid
  VARIANT 82: note = Any amino acid
  VARIANT 83: note = Any amino acid
  VARIANT 84: note = Any amino acid
  VARIANT 85: note = Any amino acid
  VARIANT 86: note = Any amino acid
  VARIANT 87: note = Any amino acid
  VARIANT 88: note = Any amino acid
  VARIANT 90: note = Any amino acid
  VARIANT 92: note = Any amino acid
  VARIANT 93: note = Any amino acid
DXXXXXXXXXXXXXXXXXXXXXXXXXXXXXXXXXXXXXXXXXXXXXXXXXXYXXXXXXXXXXXXXXXXXXXXXXXXXXXXXXXXXXXXKXDXXD

SEQ ID NO: 796532 - protein, 92 aa, unidentified
  VARIANT 2: note = Any amino acid
  VARIANT 3: note = Any amino acid
  VARIANT 4: note = Any amino acid
  VARIANT 5: note = Any amino acid
  VARIANT 6: note = Any amino acid
  VARIANT 7: note = Any amino acid
  VARIANT 8: note = Any amino acid
  VARIANT 9: note = Any amino acid
  VARIANT 10: note = Any amino acid
  VARIANT 11: note = Any amino acid
  VARIANT 12: note = Any amino acid
  VARIANT 13: note = Any amino acid
  VARIANT 14: note = Any amino acid
  VARIANT 15: note = Any amino acid
  VARIANT 16: note = Any amino acid
  VARIANT 17: note = Any amino acid
  VARIANT 18: note = Any amino acid
  VARIANT 19: note = Any amino acid
  VARIANT 20: note = Any amino acid
  VARIANT 21: note = Any amino acid
  VARIANT 22: note = Any amino acid
  VARIANT 23: note = Any amino acid
  VARIANT 24: note = Any amino acid
  VARIANT 25: note = Any amino acid
  VARIANT 26: note = Any amino acid
  VARIANT 27: note = Any amino acid
  VARIANT 28: note = Any amino acid
  VARIANT 29: note = Any amino acid
  VARIANT 30: note = Any amino acid
  VARIANT 31: note = Any amino acid
  VARIANT 32: note = Any amino acid
  VARIANT 33: note = Any amino acid
  VARIANT 34: note = Any amino acid
  VARIANT 35: note = Any amino acid
  VARIANT 36: note = Any amino acid
  VARIANT 37: note = Any amino acid
  VARIANT 38: note = Any amino acid
  VARIANT 39: note = Any amino acid
  VARIANT 40: note = Any amino acid
  VARIANT 41: note = Any amino acid
  VARIANT 42: note = Any amino acid
  VARIANT 43: note = Any amino acid
  VARIANT 44: note = Any amino acid
  VARIANT 45: note = Any amino acid
  VARIANT 46: note = Any amino acid
  VARIANT 47: note = Any amino acid
  VARIANT 48: note = Any amino acid
  VARIANT 49: note = Any amino acid
  VARIANT 50: note = Any amino acid
  VARIANT 52: note = Any amino acid
  VARIANT 53: note = Any amino acid
  VARIANT 54: note = Any amino acid
  VARIANT 55: note = Any amino acid
  VARIANT 56: note = Any amino acid
  VARIANT 57: note = Any amino acid
  VARIANT 58: note = Any amino acid
  VARIANT 59: note = Any amino acid
  VARIANT 60: note = Any amino acid
  VARIANT 61: note = Any amino acid
  VARIANT 62: note = Any amino acid
  VARIANT 63: note = Any amino acid
  VARIANT 64: note = Any amino acid
  VARIANT 65: note = Any amino acid
  VARIANT 66: note = Any amino acid
  VARIANT 67: note = Any amino acid
  VARIANT 68: note = Any amino acid
  VARIANT 69: note = Any amino acid
  VARIANT 70: note = Any amino acid
  VARIANT 71: note = Any amino acid
  VARIANT 72: note = Any amino acid
  VARIANT 73: note = Any amino acid
  VARIANT 74: note = Any amino acid
  VARIANT 75: note = Any amino acid
  VARIANT 76: note = Any amino acid
  VARIANT 77: note = Any amino acid
  VARIANT 78: note = Any amino acid
  VARIANT 79: note = Any amino acid
  VARIANT 80: note = Any amino acid
  VARIANT 81: note = Any amino acid
  VARIANT 82: note = Any amino acid
  VARIANT 83: note = Any amino acid
  VARIANT 84: note = Any amino acid
  VARIANT 85: note = Any amino acid
  VARIANT 86: note = Any amino acid
  VARIANT 88: note = Any amino acid
  VARIANT 90: note = Any amino acid
  VARIANT 91: note = Any amino acid
DXXXXXXXXXXXXXXXXXXXXXXXXXXXXXXXXXXXXXXXXXXXXXXXXXEXXXXXXXXXXXXXXXXXXXXXXXXXXXXXXXXXXXKXNXXD

SEQ ID NO: 796533 - protein, 90 aa, unidentified
  VARIANT 2: note = Any amino acid
  VARIANT 3: note = Any amino acid
  VARIANT 4: note = Any amino acid
  VARIANT 5: note = Any amino acid
  VARIANT 6: note = Any amino acid
  VARIANT 7: note = Any amino acid
  VARIANT 8: note = Any amino acid
  VARIANT 9: note = Any amino acid
  VARIANT 10: note = Any amino acid
  VARIANT 11: note = Any amino acid
  VARIANT 12: note = Any amino acid
  VARIANT 13: note = Any amino acid
  VARIANT 14: note = Any amino acid
  VARIANT 15: note = Any amino acid
  VARIANT 16: note = Any amino acid
  VARIANT 17: note = Any amino acid
  VARIANT 18: note = Any amino acid
  VARIANT 19: note = Any amino acid
  VARIANT 20: note = Any amino acid
  VARIANT 21: note = Any amino acid
  VARIANT 22: note = Any amino acid
  VARIANT 23: note = Any amino acid
  VARIANT 24: note = Any amino acid
  VARIANT 25: note = Any amino acid
  VARIANT 26: note = Any amino acid
  VARIANT 27: note = Any amino acid
  VARIANT 28: note = Any amino acid
  VARIANT 29: note = Any amino acid
  VARIANT 30: note = Any amino acid
  VARIANT 31: note = Any amino acid
  VARIANT 32: note = Any amino acid
  VARIANT 33: note = Any amino acid
  VARIANT 34: note = Any amino acid
  VARIANT 35: note = Any amino acid
  VARIANT 36: note = Any amino acid
  VARIANT 37: note = Any amino acid
  VARIANT 38: note = Any amino acid
  VARIANT 39: note = Any amino acid
  VARIANT 40: note = Any amino acid
  VARIANT 41: note = Any amino acid
  VARIANT 42: note = Any amino acid
  VARIANT 43: note = Any amino acid
  VARIANT 44: note = Any amino acid
  VARIANT 45: note = Any amino acid
  VARIANT 46: note = Any amino acid
  VARIANT 48: note = Any amino acid
  VARIANT 49: note = Any amino acid
  VARIANT 50: note = Any amino acid
  VARIANT 51: note = Any amino acid
  VARIANT 52: note = Any amino acid
  VARIANT 53: note = Any amino acid
  VARIANT 54: note = Any amino acid
  VARIANT 55: note = Any amino acid
  VARIANT 56: note = Any amino acid
  VARIANT 57: note = Any amino acid
  VARIANT 58: note = Any amino acid
  VARIANT 59: note = Any amino acid
  VARIANT 60: note = Any amino acid
  VARIANT 61: note = Any amino acid
  VARIANT 62: note = Any amino acid
  VARIANT 63: note = Any amino acid
  VARIANT 64: note = Any amino acid
  VARIANT 65: note = Any amino acid
  VARIANT 66: note = Any amino acid
  VARIANT 67: note = Any amino acid
  VARIANT 68: note = Any amino acid
  VARIANT 69: note = Any amino acid
  VARIANT 70: note = Any amino acid
  VARIANT 71: note = Any amino acid
  VARIANT 72: note = Any amino acid
  VARIANT 73: note = Any amino acid
  VARIANT 74: note = Any amino acid
  VARIANT 75: note = Any amino acid
  VARIANT 76: note = Any amino acid
  VARIANT 77: note = Any amino acid
  VARIANT 78: note = Any amino acid
  VARIANT 79: note = Any amino acid
  VARIANT 80: note = Any amino acid
  VARIANT 81: note = Any amino acid
  VARIANT 82: note = Any amino acid
  VARIANT 83: note = Any amino acid
  VARIANT 84: note = Any amino acid
  VARIANT 86: note = Any amino acid
  VARIANT 88: note = Any amino acid
  VARIANT 89: note = Any amino acid
DXXXXXXXXXXXXXXXXXXXXXXXXXXXXXXXXXXXXXXXXXXXXXHXXXXXXXXXXXXXXXXXXXXXXXXXXXXXXXXXXXXXKXDXXD

SEQ ID NO: 796534 - protein, 96 aa, unidentified
  VARIANT 2: note = Any amino acid
  VARIANT 3: note = Any amino acid
  VARIANT 4: note = Any amino acid
  VARIANT 5: note = Any amino acid
  VARIANT 6: note = Any amino acid
  VARIANT 7: note = Any amino acid
  VARIANT 8: note = Any amino acid
  VARIANT 9: note = Any amino acid
  VARIANT 10: note = Any amino acid
  VARIANT 11: note = Any amino acid
  VARIANT 12: note = Any amino acid
  VARIANT 13: note = Any amino acid
  VARIANT 14: note = Any amino acid
  VARIANT 15: note = Any amino acid
  VARIANT 16: note = Any amino acid
  VARIANT 17: note = Any amino acid
  VARIANT 18: note = Any amino acid
  VARIANT 19: note = Any amino acid
  VARIANT 20: note = Any amino acid
  VARIANT 21: note = Any amino acid
  VARIANT 22: note = Any amino acid
  VARIANT 23: note = Any amino acid
  VARIANT 24: note = Any amino acid
  VARIANT 25: note = Any amino acid
  VARIANT 26: note = Any amino acid
  VARIANT 27: note = Any amino acid
  VARIANT 28: note = Any amino acid
  VARIANT 29: note = Any amino acid
  VARIANT 30: note = Any amino acid
  VARIANT 31: note = Any amino acid
  VARIANT 32: note = Any amino acid
  VARIANT 33: note = Any amino acid
  VARIANT 34: note = Any amino acid
  VARIANT 35: note = Any amino acid
  VARIANT 36: note = Any amino acid
  VARIANT 37: note = Any amino acid
  VARIANT 38: note = Any amino acid
  VARIANT 39: note = Any amino acid
  VARIANT 40: note = Any amino acid
  VARIANT 41: note = Any amino acid
  VARIANT 42: note = Any amino acid
  VARIANT 43: note = Any amino acid
  VARIANT 44: note = Any amino acid
  VARIANT 45: note = Any amino acid
  VARIANT 46: note = Any amino acid
  VARIANT 47: note = Any amino acid
  VARIANT 48: note = Any amino acid
  VARIANT 49: note = Any amino acid
  VARIANT 50: note = Any amino acid
  VARIANT 51: note = Any amino acid
  VARIANT 53: note = Any amino acid
  VARIANT 54: note = Any amino acid
  VARIANT 55: note = Any amino acid
  VARIANT 56: note = Any amino acid
  VARIANT 57: note = Any amino acid
  VARIANT 58: note = Any amino acid
  VARIANT 59: note = Any amino acid
  VARIANT 60: note = Any amino acid
  VARIANT 61: note = Any amino acid
  VARIANT 62: note = Any amino acid
  VARIANT 63: note = Any amino acid
  VARIANT 64: note = Any amino acid
  VARIANT 65: note = Any amino acid
  VARIANT 66: note = Any amino acid
  VARIANT 67: note = Any amino acid
  VARIANT 68: note = Any amino acid
  VARIANT 69: note = Any amino acid
  VARIANT 70: note = Any amino acid
  VARIANT 71: note = Any amino acid
  VARIANT 72: note = Any amino acid
  VARIANT 73: note = Any amino acid
  VARIANT 74: note = Any amino acid
  VARIANT 75: note = Any amino acid
  VARIANT 76: note = Any amino acid
  VARIANT 77: note = Any amino acid
  VARIANT 78: note = Any amino acid
  VARIANT 79: note = Any amino acid
  VARIANT 80: note = Any amino acid
  VARIANT 81: note = Any amino acid
  VARIANT 82: note = Any amino acid
  VARIANT 83: note = Any amino acid
  VARIANT 84: note = Any amino acid
  VARIANT 85: note = Any amino acid
  VARIANT 86: note = Any amino acid
  VARIANT 87: note = Any amino acid
  VARIANT 88: note = Any amino acid
  VARIANT 89: note = Any amino acid
  VARIANT 90: note = Any amino acid
  VARIANT 92: note = Any amino acid
  VARIANT 94: note = Any amino acid
  VARIANT 95: note = Any amino acid
DXXXXXXXXXXXXXXXXXXXXXXXXXXXXXXXXXXXXXXXXXXXXXXXXXXGXXXXXXXXXXXXXXXXXXXXXXXXXXXXXXXXXXXXXXKXDXXD

SEQ ID NO: 796535 - protein, 89 aa, unidentified
  VARIANT 2: note = Any amino acid
  VARIANT 3: note = Any amino acid
  VARIANT 4: note = Any amino acid
  VARIANT 5: note = Any amino acid
  VARIANT 6: note = Any amino acid
  VARIANT 7: note = Any amino acid
  VARIANT 8: note = Any amino acid
  VARIANT 9: note = Any amino acid
  VARIANT 10: note = Any amino acid
  VARIANT 11: note = Any amino acid
  VARIANT 12: note = Any amino acid
  VARIANT 13: note = Any amino acid
  VARIANT 14: note = Any amino acid
  VARIANT 15: note = Any amino acid
  VARIANT 16: note = Any amino acid
  VARIANT 17: note = Any amino acid
  VARIANT 18: note = Any amino acid
  VARIANT 19: note = Any amino acid
  VARIANT 20: note = Any amino acid
  VARIANT 21: note = Any amino acid
  VARIANT 22: note = Any amino acid
  VARIANT 23: note = Any amino acid
  VARIANT 24: note = Any amino acid
  VARIANT 25: note = Any amino acid
  VARIANT 26: note = Any amino acid
  VARIANT 27: note = Any amino acid
  VARIANT 28: note = Any amino acid
  VARIANT 29: note = Any amino acid
  VARIANT 30: note = Any amino acid
  VARIANT 31: note = Any amino acid
  VARIANT 32: note = Any amino acid
  VARIANT 33: note = Any amino acid
  VARIANT 34: note = Any amino acid
  VARIANT 35: note = Any amino acid
  VARIANT 36: note = Any amino acid
  VARIANT 37: note = Any amino acid
  VARIANT 38: note = Any amino acid
  VARIANT 39: note = Any amino acid
  VARIANT 40: note = Any amino acid
  VARIANT 41: note = Any amino acid
  VARIANT 42: note = Any amino acid
  VARIANT 43: note = Any amino acid
  VARIANT 44: note = Any amino acid
  VARIANT 45: note = Any amino acid
  VARIANT 46: note = Any amino acid
  VARIANT 47: note = Any amino acid
  VARIANT 49: note = Any amino acid
  VARIANT 50: note = Any amino acid
  VARIANT 51: note = Any amino acid
  VARIANT 52: note = Any amino acid
  VARIANT 53: note = Any amino acid
  VARIANT 54: note = Any amino acid
  VARIANT 55: note = Any amino acid
  VARIANT 56: note = Any amino acid
  VARIANT 57: note = Any amino acid
  VARIANT 58: note = Any amino acid
  VARIANT 59: note = Any amino acid
  VARIANT 60: note = Any amino acid
  VARIANT 61: note = Any amino acid
  VARIANT 62: note = Any amino acid
  VARIANT 63: note = Any amino acid
  VARIANT 64: note = Any amino acid
  VARIANT 65: note = Any amino acid
  VARIANT 66: note = Any amino acid
  VARIANT 67: note = Any amino acid
  VARIANT 68: note = Any amino acid
  VARIANT 69: note = Any amino acid
  VARIANT 70: note = Any amino acid
  VARIANT 71: note = Any amino acid
  VARIANT 72: note = Any amino acid
  VARIANT 73: note = Any amino acid
  VARIANT 74: note = Any amino acid
  VARIANT 75: note = Any amino acid
  VARIANT 76: note = Any amino acid
  VARIANT 77: note = Any amino acid
  VARIANT 78: note = Any amino acid
  VARIANT 79: note = Any amino acid
  VARIANT 80: note = Any amino acid
  VARIANT 81: note = Any amino acid
  VARIANT 82: note = Any amino acid
  VARIANT 83: note = Any amino acid
  VARIANT 85: note = Any amino acid
  VARIANT 87: note = Any amino acid
  VARIANT 88: note = Any amino acid
DXXXXXXXXXXXXXXXXXXXXXXXXXXXXXXXXXXXXXXXXXXXXXXEXXXXXXXXXXXXXXXXXXXXXXXXXXXXXXXXXXXKXNXXD

SEQ ID NO: 796536 - protein, 88 aa, unidentified
  VARIANT 2: note = Any amino acid
  VARIANT 3: note = Any amino acid
  VARIANT 4: note = Any amino acid
  VARIANT 5: note = Any amino acid
  VARIANT 6: note = Any amino acid
  VARIANT 7: note = Any amino acid
  VARIANT 8: note = Any amino acid
  VARIANT 9: note = Any amino acid
  VARIANT 10: note = Any amino acid
  VARIANT 11: note = Any amino acid
  VARIANT 12: note = Any amino acid
  VARIANT 13: note = Any amino acid
  VARIANT 14: note = Any amino acid
  VARIANT 15: note = Any amino acid
  VARIANT 16: note = Any amino acid
  VARIANT 17: note = Any amino acid
  VARIANT 18: note = Any amino acid
  VARIANT 19: note = Any amino acid
  VARIANT 20: note = Any amino acid
  VARIANT 21: note = Any amino acid
  VARIANT 22: note = Any amino acid
  VARIANT 23: note = Any amino acid
  VARIANT 24: note = Any amino acid
  VARIANT 25: note = Any amino acid
  VARIANT 26: note = Any amino acid
  VARIANT 27: note = Any amino acid
  VARIANT 28: note = Any amino acid
  VARIANT 29: note = Any amino acid
  VARIANT 30: note = Any amino acid
  VARIANT 31: note = Any amino acid
  VARIANT 32: note = Any amino acid
  VARIANT 33: note = Any amino acid
  VARIANT 34: note = Any amino acid
  VARIANT 35: note = Any amino acid
  VARIANT 36: note = Any amino acid
  VARIANT 37: note = Any amino acid
  VARIANT 38: note = Any amino acid
  VARIANT 39: note = Any amino acid
  VARIANT 40: note = Any amino acid
  VARIANT 41: note = Any amino acid
  VARIANT 42: note = Any amino acid
  VARIANT 43: note = Any amino acid
  VARIANT 44: note = Any amino acid
  VARIANT 45: note = Any amino acid
  VARIANT 47: note = Any amino acid
  VARIANT 48: note = Any amino acid
  VARIANT 49: note = Any amino acid
  VARIANT 50: note = Any amino acid
  VARIANT 51: note = Any amino acid
  VARIANT 52: note = Any amino acid
  VARIANT 53: note = Any amino acid
  VARIANT 54: note = Any amino acid
  VARIANT 55: note = Any amino acid
  VARIANT 56: note = Any amino acid
  VARIANT 57: note = Any amino acid
  VARIANT 58: note = Any amino acid
  VARIANT 59: note = Any amino acid
  VARIANT 60: note = Any amino acid
  VARIANT 61: note = Any amino acid
  VARIANT 62: note = Any amino acid
  VARIANT 63: note = Any amino acid
  VARIANT 64: note = Any amino acid
  VARIANT 65: note = Any amino acid
  VARIANT 66: note = Any amino acid
  VARIANT 67: note = Any amino acid
  VARIANT 68: note = Any amino acid
  VARIANT 69: note = Any amino acid
  VARIANT 70: note = Any amino acid
  VARIANT 71: note = Any amino acid
  VARIANT 72: note = Any amino acid
  VARIANT 73: note = Any amino acid
  VARIANT 74: note = Any amino acid
  VARIANT 75: note = Any amino acid
  VARIANT 76: note = Any amino acid
  VARIANT 77: note = Any amino acid
  VARIANT 78: note = Any amino acid
  VARIANT 79: note = Any amino acid
  VARIANT 80: note = Any amino acid
  VARIANT 81: note = Any amino acid
  VARIANT 82: note = Any amino acid
  VARIANT 84: note = Any amino acid
  VARIANT 86: note = Any amino acid
  VARIANT 87: note = Any amino acid
DXXXXXXXXXXXXXXXXXXXXXXXXXXXXXXXXXXXXXXXXXXXXAXXXXXXXXXXXXXXXXXXXXXXXXXXXXXXXXXXXXKXDXXD

SEQ ID NO: 796537 - protein, 88 aa, unidentified
  VARIANT 2: note = Any amino acid
  VARIANT 3: note = Any amino acid
  VARIANT 4: note = Any amino acid
  VARIANT 5: note = Any amino acid
  VARIANT 6: note = Any amino acid
  VARIANT 7: note = Any amino acid
  VARIANT 8: note = Any amino acid
  VARIANT 9: note = Any amino acid
  VARIANT 10: note = Any amino acid
  VARIANT 11: note = Any amino acid
  VARIANT 12: note = Any amino acid
  VARIANT 13: note = Any amino acid
  VARIANT 14: note = Any amino acid
  VARIANT 15: note = Any amino acid
  VARIANT 16: note = Any amino acid
  VARIANT 17: note = Any amino acid
  VARIANT 18: note = Any amino acid
  VARIANT 19: note = Any amino acid
  VARIANT 20: note = Any amino acid
  VARIANT 21: note = Any amino acid
  VARIANT 22: note = Any amino acid
  VARIANT 23: note = Any amino acid
  VARIANT 24: note = Any amino acid
  VARIANT 25: note = Any amino acid
  VARIANT 26: note = Any amino acid
  VARIANT 27: note = Any amino acid
  VARIANT 28: note = Any amino acid
  VARIANT 29: note = Any amino acid
  VARIANT 30: note = Any amino acid
  VARIANT 31: note = Any amino acid
  VARIANT 32: note = Any amino acid
  VARIANT 33: note = Any amino acid
  VARIANT 34: note = Any amino acid
  VARIANT 35: note = Any amino acid
  VARIANT 36: note = Any amino acid
  VARIANT 37: note = Any amino acid
  VARIANT 38: note = Any amino acid
  VARIANT 39: note = Any amino acid
  VARIANT 40: note = Any amino acid
  VARIANT 41: note = Any amino acid
  VARIANT 42: note = Any amino acid
  VARIANT 43: note = Any amino acid
  VARIANT 44: note = Any amino acid
  VARIANT 45: note = Any amino acid
  VARIANT 47: note = Any amino acid
  VARIANT 48: note = Any amino acid
  VARIANT 49: note = Any amino acid
  VARIANT 50: note = Any amino acid
  VARIANT 51: note = Any amino acid
  VARIANT 52: note = Any amino acid
  VARIANT 53: note = Any amino acid
  VARIANT 54: note = Any amino acid
  VARIANT 55: note = Any amino acid
  VARIANT 56: note = Any amino acid
  VARIANT 57: note = Any amino acid
  VARIANT 58: note = Any amino acid
  VARIANT 59: note = Any amino acid
  VARIANT 60: note = Any amino acid
  VARIANT 61: note = Any amino acid
  VARIANT 62: note = Any amino acid
  VARIANT 63: note = Any amino acid
  VARIANT 64: note = Any amino acid
  VARIANT 65: note = Any amino acid
  VARIANT 66: note = Any amino acid
  VARIANT 67: note = Any amino acid
  VARIANT 68: note = Any amino acid
  VARIANT 69: note = Any amino acid
  VARIANT 70: note = Any amino acid
  VARIANT 71: note = Any amino acid
  VARIANT 72: note = Any amino acid
  VARIANT 73: note = Any amino acid
  VARIANT 74: note = Any amino acid
  VARIANT 75: note = Any amino acid
  VARIANT 76: note = Any amino acid
  VARIANT 77: note = Any amino acid
  VARIANT 78: note = Any amino acid
  VARIANT 79: note = Any amino acid
  VARIANT 80: note = Any amino acid
  VARIANT 81: note = Any amino acid
  VARIANT 82: note = Any amino acid
  VARIANT 84: note = Any amino acid
  VARIANT 86: note = Any amino acid
  VARIANT 87: note = Any amino acid
DXXXXXXXXXXXXXXXXXXXXXXXXXXXXXXXXXXXXXXXXXXXXCXXXXXXXXXXXXXXXXXXXXXXXXXXXXXXXXXXXXKXDXXD

SEQ ID NO: 796538 - protein, 95 aa, unidentified
  VARIANT 2: note = Any amino acid
  VARIANT 3: note = Any amino acid
  VARIANT 4: note = Any amino acid
  VARIANT 5: note = Any amino acid
  VARIANT 6: note = Any amino acid
  VARIANT 7: note = Any amino acid
  VARIANT 8: note = Any amino acid
  VARIANT 9: note = Any amino acid
  VARIANT 10: note = Any amino acid
  VARIANT 11: note = Any amino acid
  VARIANT 12: note = Any amino acid
  VARIANT 13: note = Any amino acid
  VARIANT 14: note = Any amino acid
  VARIANT 15: note = Any amino acid
  VARIANT 16: note = Any amino acid
  VARIANT 17: note = Any amino acid
  VARIANT 18: note = Any amino acid
  VARIANT 19: note = Any amino acid
  VARIANT 20: note = Any amino acid
  VARIANT 21: note = Any amino acid
  VARIANT 22: note = Any amino acid
  VARIANT 23: note = Any amino acid
  VARIANT 24: note = Any amino acid
  VARIANT 25: note = Any amino acid
  VARIANT 26: note = Any amino acid
  VARIANT 27: note = Any amino acid
  VARIANT 28: note = Any amino acid
  VARIANT 29: note = Any amino acid
  VARIANT 30: note = Any amino acid
  VARIANT 31: note = Any amino acid
  VARIANT 32: note = Any amino acid
  VARIANT 33: note = Any amino acid
  VARIANT 34: note = Any amino acid
  VARIANT 35: note = Any amino acid
  VARIANT 36: note = Any amino acid
  VARIANT 37: note = Any amino acid
  VARIANT 38: note = Any amino acid
  VARIANT 39: note = Any amino acid
  VARIANT 40: note = Any amino acid
  VARIANT 41: note = Any amino acid
  VARIANT 42: note = Any amino acid
  VARIANT 43: note = Any amino acid
  VARIANT 44: note = Any amino acid
  VARIANT 45: note = Any amino acid
  VARIANT 46: note = Any amino acid
  VARIANT 47: note = Any amino acid
  VARIANT 48: note = Any amino acid
  VARIANT 49: note = Any amino acid
  VARIANT 50: note = Any amino acid
  VARIANT 51: note = Any amino acid
  VARIANT 52: note = Any amino acid
  VARIANT 54: note = Any amino acid
  VARIANT 55: note = Any amino acid
  VARIANT 56: note = Any amino acid
  VARIANT 57: note = Any amino acid
  VARIANT 58: note = Any amino acid
  VARIANT 59: note = Any amino acid
  VARIANT 60: note = Any amino acid
  VARIANT 61: note = Any amino acid
  VARIANT 62: note = Any amino acid
  VARIANT 63: note = Any amino acid
  VARIANT 64: note = Any amino acid
  VARIANT 65: note = Any amino acid
  VARIANT 66: note = Any amino acid
  VARIANT 67: note = Any amino acid
  VARIANT 68: note = Any amino acid
  VARIANT 69: note = Any amino acid
  VARIANT 70: note = Any amino acid
  VARIANT 71: note = Any amino acid
  VARIANT 72: note = Any amino acid
  VARIANT 73: note = Any amino acid
  VARIANT 74: note = Any amino acid
  VARIANT 75: note = Any amino acid
  VARIANT 76: note = Any amino acid
  VARIANT 77: note = Any amino acid
  VARIANT 78: note = Any amino acid
  VARIANT 79: note = Any amino acid
  VARIANT 80: note = Any amino acid
  VARIANT 81: note = Any amino acid
  VARIANT 82: note = Any amino acid
  VARIANT 83: note = Any amino acid
  VARIANT 84: note = Any amino acid
  VARIANT 85: note = Any amino acid
  VARIANT 86: note = Any amino acid
  VARIANT 87: note = Any amino acid
  VARIANT 88: note = Any amino acid
  VARIANT 89: note = Any amino acid
  VARIANT 91: note = Any amino acid
  VARIANT 93: note = Any amino acid
  VARIANT 94: note = Any amino acid
DXXXXXXXXXXXXXXXXXXXXXXXXXXXXXXXXXXXXXXXXXXXXXXXXXXXYXXXXXXXXXXXXXXXXXXXXXXXXXXXXXXXXXXXXKXDXXD

SEQ ID NO: 796539 - protein, 89 aa, unidentified
  VARIANT 2: note = Any amino acid
  VARIANT 3: note = Any amino acid
  VARIANT 4: note = Any amino acid
  VARIANT 5: note = Any amino acid
  VARIANT 6: note = Any amino acid
  VARIANT 7: note = Any amino acid
  VARIANT 8: note = Any amino acid
  VARIANT 9: note = Any amino acid
  VARIANT 10: note = Any amino acid
  VARIANT 11: note = Any amino acid
  VARIANT 12: note = Any amino acid
  VARIANT 13: note = Any amino acid
  VARIANT 14: note = Any amino acid
  VARIANT 15: note = Any amino acid
  VARIANT 16: note = Any amino acid
  VARIANT 17: note = Any amino acid
  VARIANT 18: note = Any amino acid
  VARIANT 19: note = Any amino acid
  VARIANT 20: note = Any amino acid
  VARIANT 21: note = Any amino acid
  VARIANT 22: note = Any amino acid
  VARIANT 23: note = Any amino acid
  VARIANT 24: note = Any amino acid
  VARIANT 25: note = Any amino acid
  VARIANT 26: note = Any amino acid
  VARIANT 27: note = Any amino acid
  VARIANT 28: note = Any amino acid
  VARIANT 29: note = Any amino acid
  VARIANT 30: note = Any amino acid
  VARIANT 31: note = Any amino acid
  VARIANT 32: note = Any amino acid
  VARIANT 33: note = Any amino acid
  VARIANT 34: note = Any amino acid
  VARIANT 35: note = Any amino acid
  VARIANT 36: note = Any amino acid
  VARIANT 37: note = Any amino acid
  VARIANT 38: note = Any amino acid
  VARIANT 39: note = Any amino acid
  VARIANT 40: note = Any amino acid
  VARIANT 41: note = Any amino acid
  VARIANT 42: note = Any amino acid
  VARIANT 43: note = Any amino acid
  VARIANT 44: note = Any amino acid
  VARIANT 45: note = Any amino acid
  VARIANT 46: note = Any amino acid
  VARIANT 48: note = Any amino acid
  VARIANT 49: note = Any amino acid
  VARIANT 50: note = Any amino acid
  VARIANT 51: note = Any amino acid
  VARIANT 52: note = Any amino acid
  VARIANT 53: note = Any amino acid
  VARIANT 54: note = Any amino acid
  VARIANT 55: note = Any amino acid
  VARIANT 56: note = Any amino acid
  VARIANT 57: note = Any amino acid
  VARIANT 58: note = Any amino acid
  VARIANT 59: note = Any amino acid
  VARIANT 60: note = Any amino acid
  VARIANT 61: note = Any amino acid
  VARIANT 62: note = Any amino acid
  VARIANT 63: note = Any amino acid
  VARIANT 64: note = Any amino acid
  VARIANT 65: note = Any amino acid
  VARIANT 66: note = Any amino acid
  VARIANT 67: note = Any amino acid
  VARIANT 68: note = Any amino acid
  VARIANT 69: note = Any amino acid
  VARIANT 70: note = Any amino acid
  VARIANT 71: note = Any amino acid
  VARIANT 72: note = Any amino acid
  VARIANT 73: note = Any amino acid
  VARIANT 74: note = Any amino acid
  VARIANT 75: note = Any amino acid
  VARIANT 76: note = Any amino acid
  VARIANT 77: note = Any amino acid
  VARIANT 78: note = Any amino acid
  VARIANT 79: note = Any amino acid
  VARIANT 80: note = Any amino acid
  VARIANT 81: note = Any amino acid
  VARIANT 82: note = Any amino acid
  VARIANT 83: note = Any amino acid
  VARIANT 85: note = Any amino acid
  VARIANT 87: note = Any amino acid
  VARIANT 88: note = Any amino acid
DXXXXXXXXXXXXXXXXXXXXXXXXXXXXXXXXXXXXXXXXXXXXXYXXXXXXXXXXXXXXXXXXXXXXXXXXXXXXXXXXXXKXNXXD

SEQ ID NO: 796540 - protein, 88 aa, unidentified
  VARIANT 2: note = Any amino acid
  VARIANT 3: note = Any amino acid
  VARIANT 4: note = Any amino acid
  VARIANT 5: note = Any amino acid
  VARIANT 6: note = Any amino acid
  VARIANT 7: note = Any amino acid
  VARIANT 8: note = Any amino acid
  VARIANT 9: note = Any amino acid
  VARIANT 10: note = Any amino acid
  VARIANT 11: note = Any amino acid
  VARIANT 12: note = Any amino acid
  VARIANT 13: note = Any amino acid
  VARIANT 14: note = Any amino acid
  VARIANT 15: note = Any amino acid
  VARIANT 16: note = Any amino acid
  VARIANT 17: note = Any amino acid
  VARIANT 18: note = Any amino acid
  VARIANT 19: note = Any amino acid
  VARIANT 20: note = Any amino acid
  VARIANT 21: note = Any amino acid
  VARIANT 22: note = Any amino acid
  VARIANT 23: note = Any amino acid
  VARIANT 24: note = Any amino acid
  VARIANT 25: note = Any amino acid
  VARIANT 26: note = Any amino acid
  VARIANT 27: note = Any amino acid
  VARIANT 28: note = Any amino acid
  VARIANT 29: note = Any amino acid
  VARIANT 30: note = Any amino acid
  VARIANT 31: note = Any amino acid
  VARIANT 32: note = Any amino acid
  VARIANT 33: note = Any amino acid
  VARIANT 34: note = Any amino acid
  VARIANT 35: note = Any amino acid
  VARIANT 36: note = Any amino acid
  VARIANT 37: note = Any amino acid
  VARIANT 38: note = Any amino acid
  VARIANT 39: note = Any amino acid
  VARIANT 40: note = Any amino acid
  VARIANT 41: note = Any amino acid
  VARIANT 42: note = Any amino acid
  VARIANT 43: note = Any amino acid
  VARIANT 44: note = Any amino acid
  VARIANT 45: note = Any amino acid
  VARIANT 47: note = Any amino acid
  VARIANT 48: note = Any amino acid
  VARIANT 49: note = Any amino acid
  VARIANT 50: note = Any amino acid
  VARIANT 51: note = Any amino acid
  VARIANT 52: note = Any amino acid
  VARIANT 53: note = Any amino acid
  VARIANT 54: note = Any amino acid
  VARIANT 55: note = Any amino acid
  VARIANT 56: note = Any amino acid
  VARIANT 57: note = Any amino acid
  VARIANT 58: note = Any amino acid
  VARIANT 59: note = Any amino acid
  VARIANT 60: note = Any amino acid
  VARIANT 61: note = Any amino acid
  VARIANT 62: note = Any amino acid
  VARIANT 63: note = Any amino acid
  VARIANT 64: note = Any amino acid
  VARIANT 65: note = Any amino acid
  VARIANT 66: note = Any amino acid
  VARIANT 67: note = Any amino acid
  VARIANT 68: note = Any amino acid
  VARIANT 69: note = Any amino acid
  VARIANT 70: note = Any amino acid
  VARIANT 71: note = Any amino acid
  VARIANT 72: note = Any amino acid
  VARIANT 73: note = Any amino acid
  VARIANT 74: note = Any amino acid
  VARIANT 75: note = Any amino acid
  VARIANT 76: note = Any amino acid
  VARIANT 77: note = Any amino acid
  VARIANT 78: note = Any amino acid
  VARIANT 79: note = Any amino acid
  VARIANT 80: note = Any amino acid
  VARIANT 81: note = Any amino acid
  VARIANT 82: note = Any amino acid
  VARIANT 84: note = Any amino acid
  VARIANT 86: note = Any amino acid
  VARIANT 87: note = Any amino acid
DXXXXXXXXXXXXXXXXXXXXXXXXXXXXXXXXXXXXXXXXXXXXVXXXXXXXXXXXXXXXXXXXXXXXXXXXXXXXXXXXXKXDXXD

SEQ ID NO: 796541 - protein, 88 aa, unidentified
  VARIANT 2: note = Any amino acid
  VARIANT 3: note = Any amino acid
  VARIANT 4: note = Any amino acid
  VARIANT 5: note = Any amino acid
  VARIANT 6: note = Any amino acid
  VARIANT 7: note = Any amino acid
  VARIANT 8: note = Any amino acid
  VARIANT 9: note = Any amino acid
  VARIANT 10: note = Any amino acid
  VARIANT 11: note = Any amino acid
  VARIANT 12: note = Any amino acid
  VARIANT 13: note = Any amino acid
  VARIANT 14: note = Any amino acid
  VARIANT 15: note = Any amino acid
  VARIANT 16: note = Any amino acid
  VARIANT 17: note = Any amino acid
  VARIANT 18: note = Any amino acid
  VARIANT 19: note = Any amino acid
  VARIANT 20: note = Any amino acid
  VARIANT 21: note = Any amino acid
  VARIANT 22: note = Any amino acid
  VARIANT 23: note = Any amino acid
  VARIANT 24: note = Any amino acid
  VARIANT 25: note = Any amino acid
  VARIANT 26: note = Any amino acid
  VARIANT 27: note = Any amino acid
  VARIANT 28: note = Any amino acid
  VARIANT 29: note = Any amino acid
  VARIANT 30: note = Any amino acid
  VARIANT 31: note = Any amino acid
  VARIANT 32: note = Any amino acid
  VARIANT 33: note = Any amino acid
  VARIANT 34: note = Any amino acid
  VARIANT 35: note = Any amino acid
  VARIANT 36: note = Any amino acid
  VARIANT 37: note = Any amino acid
  VARIANT 38: note = Any amino acid
  VARIANT 39: note = Any amino acid
  VARIANT 40: note = Any amino acid
  VARIANT 41: note = Any amino acid
  VARIANT 42: note = Any amino acid
  VARIANT 43: note = Any amino acid
  VARIANT 44: note = Any amino acid
  VARIANT 45: note = Any amino acid
  VARIANT 46: note = Any amino acid
  VARIANT 48: note = Any amino acid
  VARIANT 49: note = Any amino acid
  VARIANT 50: note = Any amino acid
  VARIANT 51: note = Any amino acid
  VARIANT 52: note = Any amino acid
  VARIANT 53: note = Any amino acid
  VARIANT 54: note = Any amino acid
  VARIANT 55: note = Any amino acid
  VARIANT 56: note = Any amino acid
  VARIANT 57: note = Any amino acid
  VARIANT 58: note = Any amino acid
  VARIANT 59: note = Any amino acid
  VARIANT 60: note = Any amino acid
  VARIANT 61: note = Any amino acid
  VARIANT 62: note = Any amino acid
  VARIANT 63: note = Any amino acid
  VARIANT 64: note = Any amino acid
  VARIANT 65: note = Any amino acid
  VARIANT 66: note = Any amino acid
  VARIANT 67: note = Any amino acid
  VARIANT 68: note = Any amino acid
  VARIANT 69: note = Any amino acid
  VARIANT 70: note = Any amino acid
  VARIANT 71: note = Any amino acid
  VARIANT 72: note = Any amino acid
  VARIANT 73: note = Any amino acid
  VARIANT 74: note = Any amino acid
  VARIANT 75: note = Any amino acid
  VARIANT 76: note = Any amino acid
  VARIANT 77: note = Any amino acid
  VARIANT 78: note = Any amino acid
  VARIANT 79: note = Any amino acid
  VARIANT 80: note = Any amino acid
  VARIANT 81: note = Any amino acid
  VARIANT 82: note = Any amino acid
  VARIANT 84: note = Any amino acid
  VARIANT 86: note = Any amino acid
  VARIANT 87: note = Any amino acid
DXXXXXXXXXXXXXXXXXXXXXXXXXXXXXXXXXXXXXXXXXXXXXEXXXXXXXXXXXXXXXXXXXXXXXXXXXXXXXXXXXKXDXXA

SEQ ID NO: 796542 - protein, 86 aa, unidentified
  VARIANT 2: note = Any amino acid
  VARIANT 3: note = Any amino acid
  VARIANT 4: note = Any amino acid
  VARIANT 5: note = Any amino acid
  VARIANT 6: note = Any amino acid
  VARIANT 7: note = Any amino acid
  VARIANT 8: note = Any amino acid
  VARIANT 9: note = Any amino acid
  VARIANT 10: note = Any amino acid
  VARIANT 11: note = Any amino acid
  VARIANT 12: note = Any amino acid
  VARIANT 13: note = Any amino acid
  VARIANT 14: note = Any amino acid
  VARIANT 15: note = Any amino acid
  VARIANT 16: note = Any amino acid
  VARIANT 17: note = Any amino acid
  VARIANT 18: note = Any amino acid
  VARIANT 19: note = Any amino acid
  VARIANT 20: note = Any amino acid
  VARIANT 21: note = Any amino acid
  VARIANT 22: note = Any amino acid
  VARIANT 23: note = Any amino acid
  VARIANT 24: note = Any amino acid
  VARIANT 25: note = Any amino acid
  VARIANT 26: note = Any amino acid
  VARIANT 27: note = Any amino acid
  VARIANT 28: note = Any amino acid
  VARIANT 29: note = Any amino acid
  VARIANT 30: note = Any amino acid
  VARIANT 31: note = Any amino acid
  VARIANT 32: note = Any amino acid
  VARIANT 33: note = Any amino acid
  VARIANT 34: note = Any amino acid
  VARIANT 35: note = Any amino acid
  VARIANT 36: note = Any amino acid
  VARIANT 37: note = Any amino acid
  VARIANT 38: note = Any amino acid
  VARIANT 39: note = Any amino acid
  VARIANT 40: note = Any amino acid
  VARIANT 41: note = Any amino acid
  VARIANT 42: note = Any amino acid
  VARIANT 43: note = Any amino acid
  VARIANT 45: note = Any amino acid
  VARIANT 46: note = Any amino acid
  VARIANT 47: note = Any amino acid
  VARIANT 48: note = Any amino acid
  VARIANT 49: note = Any amino acid
  VARIANT 50: note = Any amino acid
  VARIANT 51: note = Any amino acid
  VARIANT 52: note = Any amino acid
  VARIANT 53: note = Any amino acid
  VARIANT 54: note = Any amino acid
  VARIANT 55: note = Any amino acid
  VARIANT 56: note = Any amino acid
  VARIANT 57: note = Any amino acid
  VARIANT 58: note = Any amino acid
  VARIANT 59: note = Any amino acid
  VARIANT 60: note = Any amino acid
  VARIANT 61: note = Any amino acid
  VARIANT 62: note = Any amino acid
  VARIANT 63: note = Any amino acid
  VARIANT 64: note = Any amino acid
  VARIANT 65: note = Any amino acid
  VARIANT 66: note = Any amino acid
  VARIANT 67: note = Any amino acid
  VARIANT 68: note = Any amino acid
  VARIANT 69: note = Any amino acid
  VARIANT 70: note = Any amino acid
  VARIANT 71: note = Any amino acid
  VARIANT 72: note = Any amino acid
  VARIANT 73: note = Any amino acid
  VARIANT 74: note = Any amino acid
  VARIANT 75: note = Any amino acid
  VARIANT 76: note = Any amino acid
  VARIANT 77: note = Any amino acid
  VARIANT 78: note = Any amino acid
  VARIANT 79: note = Any amino acid
  VARIANT 80: note = Any amino acid
  VARIANT 82: note = Any amino acid
  VARIANT 84: note = Any amino acid
  VARIANT 85: note = Any amino acid
DXXXXXXXXXXXXXXXXXXXXXXXXXXXXXXXXXXXXXXXXXXEXXXXXXXXXXXXXXXXXXXXXXXXXXXXXXXXXXXXKXDXXD

SEQ ID NO: 796543 - protein, 89 aa, unidentified
  VARIANT 2: note = Any amino acid
  VARIANT 3: note = Any amino acid
  VARIANT 4: note = Any amino acid
  VARIANT 5: note = Any amino acid
  VARIANT 6: note = Any amino acid
  VARIANT 7: note = Any amino acid
  VARIANT 8: note = Any amino acid
  VARIANT 9: note = Any amino acid
  VARIANT 10: note = Any amino acid
  VARIANT 11: note = Any amino acid
  VARIANT 12: note = Any amino acid
  VARIANT 13: note = Any amino acid
  VARIANT 14: note = Any amino acid
  VARIANT 15: note = Any amino acid
  VARIANT 16: note = Any amino acid
  VARIANT 17: note = Any amino acid
  VARIANT 18: note = Any amino acid
  VARIANT 19: note = Any amino acid
  VARIANT 20: note = Any amino acid
  VARIANT 21: note = Any amino acid
  VARIANT 22: note = Any amino acid
  VARIANT 23: note = Any amino acid
  VARIANT 24: note = Any amino acid
  VARIANT 25: note = Any amino acid
  VARIANT 26: note = Any amino acid
  VARIANT 27: note = Any amino acid
  VARIANT 28: note = Any amino acid
  VARIANT 29: note = Any amino acid
  VARIANT 30: note = Any amino acid
  VARIANT 31: note = Any amino acid
  VARIANT 32: note = Any amino acid
  VARIANT 33: note = Any amino acid
  VARIANT 34: note = Any amino acid
  VARIANT 35: note = Any amino acid
  VARIANT 36: note = Any amino acid
  VARIANT 37: note = Any amino acid
  VARIANT 38: note = Any amino acid
  VARIANT 39: note = Any amino acid
  VARIANT 40: note = Any amino acid
  VARIANT 41: note = Any amino acid
  VARIANT 42: note = Any amino acid
  VARIANT 43: note = Any amino acid
  VARIANT 44: note = Any amino acid
  VARIANT 45: note = Any amino acid
  VARIANT 47: note = Any amino acid
  VARIANT 48: note = Any amino acid
  VARIANT 49: note = Any amino acid
  VARIANT 50: note = Any amino acid
  VARIANT 51: note = Any amino acid
  VARIANT 52: note = Any amino acid
  VARIANT 53: note = Any amino acid
  VARIANT 54: note = Any amino acid
  VARIANT 55: note = Any amino acid
  VARIANT 56: note = Any amino acid
  VARIANT 57: note = Any amino acid
  VARIANT 58: note = Any amino acid
  VARIANT 59: note = Any amino acid
  VARIANT 60: note = Any amino acid
  VARIANT 61: note = Any amino acid
  VARIANT 62: note = Any amino acid
  VARIANT 63: note = Any amino acid
  VARIANT 64: note = Any amino acid
  VARIANT 65: note = Any amino acid
  VARIANT 66: note = Any amino acid
  VARIANT 67: note = Any amino acid
  VARIANT 68: note = Any amino acid
  VARIANT 69: note = Any amino acid
  VARIANT 70: note = Any amino acid
  VARIANT 71: note = Any amino acid
  VARIANT 72: note = Any amino acid
  VARIANT 73: note = Any amino acid
  VARIANT 74: note = Any amino acid
  VARIANT 75: note = Any amino acid
  VARIANT 76: note = Any amino acid
  VARIANT 77: note = Any amino acid
  VARIANT 78: note = Any amino acid
  VARIANT 79: note = Any amino acid
  VARIANT 80: note = Any amino acid
  VARIANT 81: note = Any amino acid
  VARIANT 82: note = Any amino acid
  VARIANT 83: note = Any amino acid
  VARIANT 85: note = Any amino acid
  VARIANT 87: note = Any amino acid
  VARIANT 88: note = Any amino acid
DXXXXXXXXXXXXXXXXXXXXXXXXXXXXXXXXXXXXXXXXXXXXFXXXXXXXXXXXXXXXXXXXXXXXXXXXXXXXXXXXXXKXDXXD

SEQ ID NO: 796544 - protein, 88 aa, unidentified
  VARIANT 2: note = Any amino acid
  VARIANT 3: note = Any amino acid
  VARIANT 4: note = Any amino acid
  VARIANT 5: note = Any amino acid
  VARIANT 6: note = Any amino acid
  VARIANT 7: note = Any amino acid
  VARIANT 8: note = Any amino acid
  VARIANT 9: note = Any amino acid
  VARIANT 10: note = Any amino acid
  VARIANT 11: note = Any amino acid
  VARIANT 12: note = Any amino acid
  VARIANT 13: note = Any amino acid
  VARIANT 14: note = Any amino acid
  VARIANT 15: note = Any amino acid
  VARIANT 16: note = Any amino acid
  VARIANT 17: note = Any amino acid
  VARIANT 18: note = Any amino acid
  VARIANT 19: note = Any amino acid
  VARIANT 20: note = Any amino acid
  VARIANT 21: note = Any amino acid
  VARIANT 22: note = Any amino acid
  VARIANT 23: note = Any amino acid
  VARIANT 24: note = Any amino acid
  VARIANT 25: note = Any amino acid
  VARIANT 26: note = Any amino acid
  VARIANT 27: note = Any amino acid
  VARIANT 28: note = Any amino acid
  VARIANT 29: note = Any amino acid
  VARIANT 30: note = Any amino acid
  VARIANT 31: note = Any amino acid
  VARIANT 32: note = Any amino acid
  VARIANT 33: note = Any amino acid
  VARIANT 34: note = Any amino acid
  VARIANT 35: note = Any amino acid
  VARIANT 36: note = Any amino acid
  VARIANT 37: note = Any amino acid
  VARIANT 38: note = Any amino acid
  VARIANT 39: note = Any amino acid
  VARIANT 40: note = Any amino acid
  VARIANT 41: note = Any amino acid
  VARIANT 42: note = Any amino acid
  VARIANT 43: note = Any amino acid
  VARIANT 44: note = Any amino acid
  VARIANT 45: note = Any amino acid
  VARIANT 46: note = Any amino acid
  VARIANT 48: note = Any amino acid
  VARIANT 49: note = Any amino acid
  VARIANT 50: note = Any amino acid
  VARIANT 51: note = Any amino acid
  VARIANT 52: note = Any amino acid
  VARIANT 53: note = Any amino acid
  VARIANT 54: note = Any amino acid
  VARIANT 55: note = Any amino acid
  VARIANT 56: note = Any amino acid
  VARIANT 57: note = Any amino acid
  VARIANT 58: note = Any amino acid
  VARIANT 59: note = Any amino acid
  VARIANT 60: note = Any amino acid
  VARIANT 61: note = Any amino acid
  VARIANT 62: note = Any amino acid
  VARIANT 63: note = Any amino acid
  VARIANT 64: note = Any amino acid
  VARIANT 65: note = Any amino acid
  VARIANT 66: note = Any amino acid
  VARIANT 67: note = Any amino acid
  VARIANT 68: note = Any amino acid
  VARIANT 69: note = Any amino acid
  VARIANT 70: note = Any amino acid
  VARIANT 71: note = Any amino acid
  VARIANT 72: note = Any amino acid
  VARIANT 73: note = Any amino acid
  VARIANT 74: note = Any amino acid
  VARIANT 75: note = Any amino acid
  VARIANT 76: note = Any amino acid
  VARIANT 77: note = Any amino acid
  VARIANT 78: note = Any amino acid
  VARIANT 79: note = Any amino acid
  VARIANT 80: note = Any amino acid
  VARIANT 81: note = Any amino acid
  VARIANT 82: note = Any amino acid
  VARIANT 84: note = Any amino acid
  VARIANT 86: note = Any amino acid
  VARIANT 87: note = Any amino acid
DXXXXXXXXXXXXXXXXXXXXXXXXXXXXXXXXXXXXXXXXXXXXXYXXXXXXXXXXXXXXXXXXXXXXXXXXXXXXXXXXXKXDXXD

SEQ ID NO: 796545 - protein, 88 aa, unidentified
  VARIANT 2: note = Any amino acid
  VARIANT 3: note = Any amino acid
  VARIANT 4: note = Any amino acid
  VARIANT 5: note = Any amino acid
  VARIANT 6: note = Any amino acid
  VARIANT 7: note = Any amino acid
  VARIANT 8: note = Any amino acid
  VARIANT 9: note = Any amino acid
  VARIANT 10: note = Any amino acid
  VARIANT 11: note = Any amino acid
  VARIANT 12: note = Any amino acid
  VARIANT 13: note = Any amino acid
  VARIANT 14: note = Any amino acid
  VARIANT 15: note = Any amino acid
  VARIANT 16: note = Any amino acid
  VARIANT 17: note = Any amino acid
  VARIANT 18: note = Any amino acid
  VARIANT 19: note = Any amino acid
  VARIANT 20: note = Any amino acid
  VARIANT 21: note = Any amino acid
  VARIANT 22: note = Any amino acid
  VARIANT 23: note = Any amino acid
  VARIANT 24: note = Any amino acid
  VARIANT 25: note = Any amino acid
  VARIANT 26: note = Any amino acid
  VARIANT 27: note = Any amino acid
  VARIANT 28: note = Any amino acid
  VARIANT 29: note = Any amino acid
  VARIANT 30: note = Any amino acid
  VARIANT 31: note = Any amino acid
  VARIANT 32: note = Any amino acid
  VARIANT 33: note = Any amino acid
  VARIANT 34: note = Any amino acid
  VARIANT 35: note = Any amino acid
  VARIANT 36: note = Any amino acid
  VARIANT 37: note = Any amino acid
  VARIANT 38: note = Any amino acid
  VARIANT 39: note = Any amino acid
  VARIANT 40: note = Any amino acid
  VARIANT 41: note = Any amino acid
  VARIANT 42: note = Any amino acid
  VARIANT 43: note = Any amino acid
  VARIANT 44: note = Any amino acid
  VARIANT 45: note = Any amino acid
  VARIANT 47: note = Any amino acid
  VARIANT 48: note = Any amino acid
  VARIANT 49: note = Any amino acid
  VARIANT 50: note = Any amino acid
  VARIANT 51: note = Any amino acid
  VARIANT 52: note = Any amino acid
  VARIANT 53: note = Any amino acid
  VARIANT 54: note = Any amino acid
  VARIANT 55: note = Any amino acid
  VARIANT 56: note = Any amino acid
  VARIANT 57: note = Any amino acid
  VARIANT 58: note = Any amino acid
  VARIANT 59: note = Any amino acid
  VARIANT 60: note = Any amino acid
  VARIANT 61: note = Any amino acid
  VARIANT 62: note = Any amino acid
  VARIANT 63: note = Any amino acid
  VARIANT 64: note = Any amino acid
  VARIANT 65: note = Any amino acid
  VARIANT 66: note = Any amino acid
  VARIANT 67: note = Any amino acid
  VARIANT 68: note = Any amino acid
  VARIANT 69: note = Any amino acid
  VARIANT 70: note = Any amino acid
  VARIANT 71: note = Any amino acid
  VARIANT 72: note = Any amino acid
  VARIANT 73: note = Any amino acid
  VARIANT 74: note = Any amino acid
  VARIANT 75: note = Any amino acid
  VARIANT 76: note = Any amino acid
  VARIANT 77: note = Any amino acid
  VARIANT 78: note = Any amino acid
  VARIANT 79: note = Any amino acid
  VARIANT 80: note = Any amino acid
  VARIANT 81: note = Any amino acid
  VARIANT 82: note = Any amino acid
  VARIANT 84: note = Any amino acid
  VARIANT 86: note = Any amino acid
  VARIANT 87: note = Any amino acid
DXXXXXXXXXXXXXXXXXXXXXXXXXXXXXXXXXXXXXXXXXXXXIXXXXXXXXXXXXXXXXXXXXXXXXXXXXXXXXXXXXKXDXXD

SEQ ID NO: 796546 - protein, 87 aa, unidentified
  VARIANT 2: note = Any amino acid
  VARIANT 3: note = Any amino acid
  VARIANT 4: note = Any amino acid
  VARIANT 5: note = Any amino acid
  VARIANT 6: note = Any amino acid
  VARIANT 7: note = Any amino acid
  VARIANT 8: note = Any amino acid
  VARIANT 9: note = Any amino acid
  VARIANT 10: note = Any amino acid
  VARIANT 11: note = Any amino acid
  VARIANT 12: note = Any amino acid
  VARIANT 13: note = Any amino acid
  VARIANT 14: note = Any amino acid
  VARIANT 15: note = Any amino acid
  VARIANT 16: note = Any amino acid
  VARIANT 17: note = Any amino acid
  VARIANT 18: note = Any amino acid
  VARIANT 19: note = Any amino acid
  VARIANT 20: note = Any amino acid
  VARIANT 21: note = Any amino acid
  VARIANT 22: note = Any amino acid
  VARIANT 23: note = Any amino acid
  VARIANT 24: note = Any amino acid
  VARIANT 25: note = Any amino acid
  VARIANT 26: note = Any amino acid
  VARIANT 27: note = Any amino acid
  VARIANT 28: note = Any amino acid
  VARIANT 29: note = Any amino acid
  VARIANT 30: note = Any amino acid
  VARIANT 31: note = Any amino acid
  VARIANT 32: note = Any amino acid
  VARIANT 33: note = Any amino acid
  VARIANT 34: note = Any amino acid
  VARIANT 35: note = Any amino acid
  VARIANT 36: note = Any amino acid
  VARIANT 37: note = Any amino acid
  VARIANT 38: note = Any amino acid
  VARIANT 39: note = Any amino acid
  VARIANT 40: note = Any amino acid
  VARIANT 41: note = Any amino acid
  VARIANT 42: note = Any amino acid
  VARIANT 43: note = Any amino acid
  VARIANT 44: note = Any amino acid
  VARIANT 45: note = Any amino acid
  VARIANT 47: note = Any amino acid
  VARIANT 48: note = Any amino acid
  VARIANT 49: note = Any amino acid
  VARIANT 50: note = Any amino acid
  VARIANT 51: note = Any amino acid
  VARIANT 52: note = Any amino acid
  VARIANT 53: note = Any amino acid
  VARIANT 54: note = Any amino acid
  VARIANT 55: note = Any amino acid
  VARIANT 56: note = Any amino acid
  VARIANT 57: note = Any amino acid
  VARIANT 58: note = Any amino acid
  VARIANT 59: note = Any amino acid
  VARIANT 60: note = Any amino acid
  VARIANT 61: note = Any amino acid
  VARIANT 62: note = Any amino acid
  VARIANT 63: note = Any amino acid
  VARIANT 64: note = Any amino acid
  VARIANT 65: note = Any amino acid
  VARIANT 66: note = Any amino acid
  VARIANT 67: note = Any amino acid
  VARIANT 68: note = Any amino acid
  VARIANT 69: note = Any amino acid
  VARIANT 70: note = Any amino acid
  VARIANT 71: note = Any amino acid
  VARIANT 72: note = Any amino acid
  VARIANT 73: note = Any amino acid
  VARIANT 74: note = Any amino acid
  VARIANT 75: note = Any amino acid
  VARIANT 76: note = Any amino acid
  VARIANT 77: note = Any amino acid
  VARIANT 78: note = Any amino acid
  VARIANT 79: note = Any amino acid
  VARIANT 80: note = Any amino acid
  VARIANT 81: note = Any amino acid
  VARIANT 83: note = Any amino acid
  VARIANT 85: note = Any amino acid
  VARIANT 86: note = Any amino acid
DXXXXXXXXXXXXXXXXXXXXXXXXXXXXXXXXXXXXXXXXXXXXFXXXXXXXXXXXXXXXXXXXXXXXXXXXXXXXXXXXKXDXXD

SEQ ID NO: 796547 - protein, 87 aa, unidentified
  VARIANT 2: note = Any amino acid
  VARIANT 3: note = Any amino acid
  VARIANT 4: note = Any amino acid
  VARIANT 5: note = Any amino acid
  VARIANT 6: note = Any amino acid
  VARIANT 7: note = Any amino acid
  VARIANT 8: note = Any amino acid
  VARIANT 9: note = Any amino acid
  VARIANT 10: note = Any amino acid
  VARIANT 11: note = Any amino acid
  VARIANT 12: note = Any amino acid
  VARIANT 13: note = Any amino acid
  VARIANT 14: note = Any amino acid
  VARIANT 15: note = Any amino acid
  VARIANT 16: note = Any amino acid
  VARIANT 17: note = Any amino acid
  VARIANT 18: note = Any amino acid
  VARIANT 19: note = Any amino acid
  VARIANT 20: note = Any amino acid
  VARIANT 21: note = Any amino acid
  VARIANT 22: note = Any amino acid
  VARIANT 23: note = Any amino acid
  VARIANT 24: note = Any amino acid
  VARIANT 25: note = Any amino acid
  VARIANT 26: note = Any amino acid
  VARIANT 27: note = Any amino acid
  VARIANT 28: note = Any amino acid
  VARIANT 29: note = Any amino acid
  VARIANT 30: note = Any amino acid
  VARIANT 31: note = Any amino acid
  VARIANT 32: note = Any amino acid
  VARIANT 33: note = Any amino acid
  VARIANT 34: note = Any amino acid
  VARIANT 35: note = Any amino acid
  VARIANT 36: note = Any amino acid
  VARIANT 37: note = Any amino acid
  VARIANT 38: note = Any amino acid
  VARIANT 39: note = Any amino acid
  VARIANT 40: note = Any amino acid
  VARIANT 41: note = Any amino acid
  VARIANT 42: note = Any amino acid
  VARIANT 43: note = Any amino acid
  VARIANT 44: note = Any amino acid
  VARIANT 45: note = Any amino acid
  VARIANT 47: note = Any amino acid
  VARIANT 48: note = Any amino acid
  VARIANT 49: note = Any amino acid
  VARIANT 50: note = Any amino acid
  VARIANT 51: note = Any amino acid
  VARIANT 52: note = Any amino acid
  VARIANT 53: note = Any amino acid
  VARIANT 54: note = Any amino acid
  VARIANT 55: note = Any amino acid
  VARIANT 56: note = Any amino acid
  VARIANT 57: note = Any amino acid
  VARIANT 58: note = Any amino acid
  VARIANT 59: note = Any amino acid
  VARIANT 60: note = Any amino acid
  VARIANT 61: note = Any amino acid
  VARIANT 62: note = Any amino acid
  VARIANT 63: note = Any amino acid
  VARIANT 64: note = Any amino acid
  VARIANT 65: note = Any amino acid
  VARIANT 66: note = Any amino acid
  VARIANT 67: note = Any amino acid
  VARIANT 68: note = Any amino acid
  VARIANT 69: note = Any amino acid
  VARIANT 70: note = Any amino acid
  VARIANT 71: note = Any amino acid
  VARIANT 72: note = Any amino acid
  VARIANT 73: note = Any amino acid
  VARIANT 74: note = Any amino acid
  VARIANT 75: note = Any amino acid
  VARIANT 76: note = Any amino acid
  VARIANT 77: note = Any amino acid
  VARIANT 78: note = Any amino acid
  VARIANT 79: note = Any amino acid
  VARIANT 80: note = Any amino acid
  VARIANT 81: note = Any amino acid
  VARIANT 83: note = Any amino acid
  VARIANT 85: note = Any amino acid
  VARIANT 86: note = Any amino acid
DXXXXXXXXXXXXXXXXXXXXXXXXXXXXXXXXXXXXXXXXXXXXEXXXXXXXXXXXXXXXXXXXXXXXXXXXXXXXXXXXRXDXXD

SEQ ID NO: 796548 - protein, 88 aa, unidentified
  VARIANT 2: note = Any amino acid
  VARIANT 3: note = Any amino acid
  VARIANT 4: note = Any amino acid
  VARIANT 5: note = Any amino acid
  VARIANT 6: note = Any amino acid
  VARIANT 7: note = Any amino acid
  VARIANT 8: note = Any amino acid
  VARIANT 9: note = Any amino acid
  VARIANT 10: note = Any amino acid
  VARIANT 11: note = Any amino acid
  VARIANT 12: note = Any amino acid
  VARIANT 13: note = Any amino acid
  VARIANT 14: note = Any amino acid
  VARIANT 15: note = Any amino acid
  VARIANT 16: note = Any amino acid
  VARIANT 17: note = Any amino acid
  VARIANT 18: note = Any amino acid
  VARIANT 19: note = Any amino acid
  VARIANT 20: note = Any amino acid
  VARIANT 21: note = Any amino acid
  VARIANT 22: note = Any amino acid
  VARIANT 23: note = Any amino acid
  VARIANT 24: note = Any amino acid
  VARIANT 25: note = Any amino acid
  VARIANT 26: note = Any amino acid
  VARIANT 27: note = Any amino acid
  VARIANT 28: note = Any amino acid
  VARIANT 29: note = Any amino acid
  VARIANT 30: note = Any amino acid
  VARIANT 31: note = Any amino acid
  VARIANT 32: note = Any amino acid
  VARIANT 33: note = Any amino acid
  VARIANT 34: note = Any amino acid
  VARIANT 35: note = Any amino acid
  VARIANT 36: note = Any amino acid
  VARIANT 37: note = Any amino acid
  VARIANT 38: note = Any amino acid
  VARIANT 39: note = Any amino acid
  VARIANT 40: note = Any amino acid
  VARIANT 41: note = Any amino acid
  VARIANT 42: note = Any amino acid
  VARIANT 43: note = Any amino acid
  VARIANT 44: note = Any amino acid
  VARIANT 45: note = Any amino acid
  VARIANT 47: note = Any amino acid
  VARIANT 48: note = Any amino acid
  VARIANT 49: note = Any amino acid
  VARIANT 50: note = Any amino acid
  VARIANT 51: note = Any amino acid
  VARIANT 52: note = Any amino acid
  VARIANT 53: note = Any amino acid
  VARIANT 54: note = Any amino acid
  VARIANT 55: note = Any amino acid
  VARIANT 56: note = Any amino acid
  VARIANT 57: note = Any amino acid
  VARIANT 58: note = Any amino acid
  VARIANT 59: note = Any amino acid
  VARIANT 60: note = Any amino acid
  VARIANT 61: note = Any amino acid
  VARIANT 62: note = Any amino acid
  VARIANT 63: note = Any amino acid
  VARIANT 64: note = Any amino acid
  VARIANT 65: note = Any amino acid
  VARIANT 66: note = Any amino acid
  VARIANT 67: note = Any amino acid
  VARIANT 68: note = Any amino acid
  VARIANT 69: note = Any amino acid
  VARIANT 70: note = Any amino acid
  VARIANT 71: note = Any amino acid
  VARIANT 72: note = Any amino acid
  VARIANT 73: note = Any amino acid
  VARIANT 74: note = Any amino acid
  VARIANT 75: note = Any amino acid
  VARIANT 76: note = Any amino acid
  VARIANT 77: note = Any amino acid
  VARIANT 78: note = Any amino acid
  VARIANT 79: note = Any amino acid
  VARIANT 80: note = Any amino acid
  VARIANT 81: note = Any amino acid
  VARIANT 82: note = Any amino acid
  VARIANT 84: note = Any amino acid
  VARIANT 86: note = Any amino acid
  VARIANT 87: note = Any amino acid
DXXXXXXXXXXXXXXXXXXXXXXXXXXXXXXXXXXXXXXXXXXXXFXXXXXXXXXXXXXXXXXXXXXXXXXXXXXXXXXXXXKXDXXD

SEQ ID NO: 796549 - protein, 84 aa, unidentified
  VARIANT 2: note = Any amino acid
  VARIANT 3: note = Any amino acid
  VARIANT 4: note = Any amino acid
  VARIANT 5: note = Any amino acid
  VARIANT 6: note = Any amino acid
  VARIANT 7: note = Any amino acid
  VARIANT 8: note = Any amino acid
  VARIANT 9: note = Any amino acid
  VARIANT 10: note = Any amino acid
  VARIANT 11: note = Any amino acid
  VARIANT 12: note = Any amino acid
  VARIANT 13: note = Any amino acid
  VARIANT 14: note = Any amino acid
  VARIANT 15: note = Any amino acid
  VARIANT 16: note = Any amino acid
  VARIANT 17: note = Any amino acid
  VARIANT 18: note = Any amino acid
  VARIANT 19: note = Any amino acid
  VARIANT 20: note = Any amino acid
  VARIANT 21: note = Any amino acid
  VARIANT 22: note = Any amino acid
  VARIANT 23: note = Any amino acid
  VARIANT 24: note = Any amino acid
  VARIANT 25: note = Any amino acid
  VARIANT 26: note = Any amino acid
  VARIANT 27: note = Any amino acid
  VARIANT 28: note = Any amino acid
  VARIANT 29: note = Any amino acid
  VARIANT 30: note = Any amino acid
  VARIANT 31: note = Any amino acid
  VARIANT 32: note = Any amino acid
  VARIANT 33: note = Any amino acid
  VARIANT 34: note = Any amino acid
  VARIANT 35: note = Any amino acid
  VARIANT 36: note = Any amino acid
  VARIANT 37: note = Any amino acid
  VARIANT 38: note = Any amino acid
  VARIANT 39: note = Any amino acid
  VARIANT 40: note = Any amino acid
  VARIANT 41: note = Any amino acid
  VARIANT 42: note = Any amino acid
  VARIANT 44: note = Any amino acid
  VARIANT 45: note = Any amino acid
  VARIANT 46: note = Any amino acid
  VARIANT 47: note = Any amino acid
  VARIANT 48: note = Any amino acid
  VARIANT 49: note = Any amino acid
  VARIANT 50: note = Any amino acid
  VARIANT 51: note = Any amino acid
  VARIANT 52: note = Any amino acid
  VARIANT 53: note = Any amino acid
  VARIANT 54: note = Any amino acid
  VARIANT 55: note = Any amino acid
  VARIANT 56: note = Any amino acid
  VARIANT 57: note = Any amino acid
  VARIANT 58: note = Any amino acid
  VARIANT 59: note = Any amino acid
  VARIANT 60: note = Any amino acid
  VARIANT 61: note = Any amino acid
  VARIANT 62: note = Any amino acid
  VARIANT 63: note = Any amino acid
  VARIANT 64: note = Any amino acid
  VARIANT 65: note = Any amino acid
  VARIANT 66: note = Any amino acid
  VARIANT 67: note = Any amino acid
  VARIANT 68: note = Any amino acid
  VARIANT 69: note = Any amino acid
  VARIANT 70: note = Any amino acid
  VARIANT 71: note = Any amino acid
  VARIANT 72: note = Any amino acid
  VARIANT 73: note = Any amino acid
  VARIANT 74: note = Any amino acid
  VARIANT 75: note = Any amino acid
  VARIANT 76: note = Any amino acid
  VARIANT 77: note = Any amino acid
  VARIANT 78: note = Any amino acid
  VARIANT 80: note = Any amino acid
  VARIANT 82: note = Any amino acid
  VARIANT 83: note = Any amino acid
DXXXXXXXXXXXXXXXXXXXXXXXXXXXXXXXXXXXXXXXXXEXXXXXXXXXXXXXXXXXXXXXXXXXXXXXXXXXXXKXDXXD

SEQ ID NO: 796550 - protein, 84 aa, unidentified
  VARIANT 2: note = Any amino acid
  VARIANT 3: note = Any amino acid
  VARIANT 4: note = Any amino acid
  VARIANT 5: note = Any amino acid
  VARIANT 6: note = Any amino acid
  VARIANT 7: note = Any amino acid
  VARIANT 8: note = Any amino acid
  VARIANT 9: note = Any amino acid
  VARIANT 10: note = Any amino acid
  VARIANT 11: note = Any amino acid
  VARIANT 12: note = Any amino acid
  VARIANT 13: note = Any amino acid
  VARIANT 14: note = Any amino acid
  VARIANT 15: note = Any amino acid
  VARIANT 16: note = Any amino acid
  VARIANT 17: note = Any amino acid
  VARIANT 18: note = Any amino acid
  VARIANT 19: note = Any amino acid
  VARIANT 20: note = Any amino acid
  VARIANT 21: note = Any amino acid
  VARIANT 22: note = Any amino acid
  VARIANT 23: note = Any amino acid
  VARIANT 24: note = Any amino acid
  VARIANT 25: note = Any amino acid
  VARIANT 26: note = Any amino acid
  VARIANT 27: note = Any amino acid
  VARIANT 28: note = Any amino acid
  VARIANT 29: note = Any amino acid
  VARIANT 30: note = Any amino acid
  VARIANT 31: note = Any amino acid
  VARIANT 32: note = Any amino acid
  VARIANT 33: note = Any amino acid
  VARIANT 34: note = Any amino acid
  VARIANT 35: note = Any amino acid
  VARIANT 36: note = Any amino acid
  VARIANT 37: note = Any amino acid
  VARIANT 38: note = Any amino acid
  VARIANT 39: note = Any amino acid
  VARIANT 40: note = Any amino acid
  VARIANT 41: note = Any amino acid
  VARIANT 42: note = Any amino acid
  VARIANT 43: note = Any amino acid
  VARIANT 44: note = Any amino acid
  VARIANT 45: note = Any amino acid
  VARIANT 47: note = Any amino acid
  VARIANT 48: note = Any amino acid
  VARIANT 49: note = Any amino acid
  VARIANT 50: note = Any amino acid
  VARIANT 51: note = Any amino acid
  VARIANT 52: note = Any amino acid
  VARIANT 53: note = Any amino acid
  VARIANT 54: note = Any amino acid
  VARIANT 55: note = Any amino acid
  VARIANT 56: note = Any amino acid
  VARIANT 57: note = Any amino acid
  VARIANT 58: note = Any amino acid
  VARIANT 59: note = Any amino acid
  VARIANT 60: note = Any amino acid
  VARIANT 61: note = Any amino acid
  VARIANT 62: note = Any amino acid
  VARIANT 63: note = Any amino acid
  VARIANT 64: note = Any amino acid
  VARIANT 65: note = Any amino acid
  VARIANT 66: note = Any amino acid
  VARIANT 67: note = Any amino acid
  VARIANT 68: note = Any amino acid
  VARIANT 69: note = Any amino acid
  VARIANT 70: note = Any amino acid
  VARIANT 71: note = Any amino acid
  VARIANT 72: note = Any amino acid
  VARIANT 73: note = Any amino acid
  VARIANT 74: note = Any amino acid
  VARIANT 75: note = Any amino acid
  VARIANT 76: note = Any amino acid
  VARIANT 77: note = Any amino acid
  VARIANT 78: note = Any amino acid
  VARIANT 80: note = Any amino acid
  VARIANT 82: note = Any amino acid
  VARIANT 83: note = Any amino acid
DXXXXXXXXXXXXXXXXXXXXXXXXXXXXXXXXXXXXXXXXXXXXCXXXXXXXXXXXXXXXXXXXXXXXXXXXXXXXXKXDXXD

SEQ ID NO: 796551 - protein, 88 aa, unidentified
  VARIANT 2: note = Any amino acid
  VARIANT 3: note = Any amino acid
  VARIANT 4: note = Any amino acid
  VARIANT 5: note = Any amino acid
  VARIANT 6: note = Any amino acid
  VARIANT 7: note = Any amino acid
  VARIANT 8: note = Any amino acid
  VARIANT 9: note = Any amino acid
  VARIANT 10: note = Any amino acid
  VARIANT 11: note = Any amino acid
  VARIANT 12: note = Any amino acid
  VARIANT 13: note = Any amino acid
  VARIANT 14: note = Any amino acid
  VARIANT 15: note = Any amino acid
  VARIANT 16: note = Any amino acid
  VARIANT 17: note = Any amino acid
  VARIANT 18: note = Any amino acid
  VARIANT 19: note = Any amino acid
  VARIANT 20: note = Any amino acid
  VARIANT 21: note = Any amino acid
  VARIANT 22: note = Any amino acid
  VARIANT 23: note = Any amino acid
  VARIANT 24: note = Any amino acid
  VARIANT 25: note = Any amino acid
  VARIANT 26: note = Any amino acid
  VARIANT 27: note = Any amino acid
  VARIANT 28: note = Any amino acid
  VARIANT 29: note = Any amino acid
  VARIANT 30: note = Any amino acid
  VARIANT 31: note = Any amino acid
  VARIANT 32: note = Any amino acid
  VARIANT 33: note = Any amino acid
  VARIANT 34: note = Any amino acid
  VARIANT 35: note = Any amino acid
  VARIANT 36: note = Any amino acid
  VARIANT 37: note = Any amino acid
  VARIANT 38: note = Any amino acid
  VARIANT 39: note = Any amino acid
  VARIANT 40: note = Any amino acid
  VARIANT 41: note = Any amino acid
  VARIANT 42: note = Any amino acid
  VARIANT 43: note = Any amino acid
  VARIANT 44: note = Any amino acid
  VARIANT 45: note = Any amino acid
  VARIANT 46: note = Any amino acid
  VARIANT 48: note = Any amino acid
  VARIANT 49: note = Any amino acid
  VARIANT 50: note = Any amino acid
  VARIANT 51: note = Any amino acid
  VARIANT 52: note = Any amino acid
  VARIANT 53: note = Any amino acid
  VARIANT 54: note = Any amino acid
  VARIANT 55: note = Any amino acid
  VARIANT 56: note = Any amino acid
  VARIANT 57: note = Any amino acid
  VARIANT 58: note = Any amino acid
  VARIANT 59: note = Any amino acid
  VARIANT 60: note = Any amino acid
  VARIANT 61: note = Any amino acid
  VARIANT 62: note = Any amino acid
  VARIANT 63: note = Any amino acid
  VARIANT 64: note = Any amino acid
  VARIANT 65: note = Any amino acid
  VARIANT 66: note = Any amino acid
  VARIANT 67: note = Any amino acid
  VARIANT 68: note = Any amino acid
  VARIANT 69: note = Any amino acid
  VARIANT 70: note = Any amino acid
  VARIANT 71: note = Any amino acid
  VARIANT 72: note = Any amino acid
  VARIANT 73: note = Any amino acid
  VARIANT 74: note = Any amino acid
  VARIANT 75: note = Any amino acid
  VARIANT 76: note = Any amino acid
  VARIANT 77: note = Any amino acid
  VARIANT 78: note = Any amino acid
  VARIANT 79: note = Any amino acid
  VARIANT 80: note = Any amino acid
  VARIANT 81: note = Any amino acid
  VARIANT 82: note = Any amino acid
  VARIANT 84: note = Any amino acid
  VARIANT 86: note = Any amino acid
  VARIANT 87: note = Any amino acid
DXXXXXXXXXXXXXXXXXXXXXXXXXXXXXXXXXXXXXXXXXXXXXEXXXXXXXXXXXXXXXXXXXXXXXXXXXXXXXXXXXKXNXXD

SEQ ID NO: 796552 - protein, 100 aa, unidentified
  VARIANT 2: note = Any amino acid
  VARIANT 3: note = Any amino acid
  VARIANT 4: note = Any amino acid
  VARIANT 5: note = Any amino acid
  VARIANT 6: note = Any amino acid
  VARIANT 7: note = Any amino acid
  VARIANT 8: note = Any amino acid
  VARIANT 9: note = Any amino acid
  VARIANT 10: note = Any amino acid
  VARIANT 11: note = Any amino acid
  VARIANT 12: note = Any amino acid
  VARIANT 13: note = Any amino acid
  VARIANT 14: note = Any amino acid
  VARIANT 15: note = Any amino acid
  VARIANT 16: note = Any amino acid
  VARIANT 17: note = Any amino acid
  VARIANT 18: note = Any amino acid
  VARIANT 19: note = Any amino acid
  VARIANT 20: note = Any amino acid
  VARIANT 21: note = Any amino acid
  VARIANT 22: note = Any amino acid
  VARIANT 23: note = Any amino acid
  VARIANT 24: note = Any amino acid
  VARIANT 25: note = Any amino acid
  VARIANT 26: note = Any amino acid
  VARIANT 27: note = Any amino acid
  VARIANT 28: note = Any amino acid
  VARIANT 29: note = Any amino acid
  VARIANT 30: note = Any amino acid
  VARIANT 31: note = Any amino acid
  VARIANT 32: note = Any amino acid
  VARIANT 33: note = Any amino acid
  VARIANT 34: note = Any amino acid
  VARIANT 35: note = Any amino acid
  VARIANT 36: note = Any amino acid
  VARIANT 37: note = Any amino acid
  VARIANT 38: note = Any amino acid
  VARIANT 39: note = Any amino acid
  VARIANT 40: note = Any amino acid
  VARIANT 41: note = Any amino acid
  VARIANT 42: note = Any amino acid
  VARIANT 43: note = Any amino acid
  VARIANT 44: note = Any amino acid
  VARIANT 45: note = Any amino acid
  VARIANT 46: note = Any amino acid
  VARIANT 47: note = Any amino acid
  VARIANT 48: note = Any amino acid
  VARIANT 49: note = Any amino acid
  VARIANT 50: note = Any amino acid
  VARIANT 51: note = Any amino acid
  VARIANT 52: note = Any amino acid
  VARIANT 53: note = Any amino acid
  VARIANT 54: note = Any amino acid
  VARIANT 55: note = Any amino acid
  VARIANT 56: note = Any amino acid
  VARIANT 58: note = Any amino acid
  VARIANT 59: note = Any amino acid
  VARIANT 60: note = Any amino acid
  VARIANT 61: note = Any amino acid
  VARIANT 62: note = Any amino acid
  VARIANT 63: note = Any amino acid
  VARIANT 64: note = Any amino acid
  VARIANT 65: note = Any amino acid
  VARIANT 66: note = Any amino acid
  VARIANT 67: note = Any amino acid
  VARIANT 68: note = Any amino acid
  VARIANT 69: note = Any amino acid
  VARIANT 70: note = Any amino acid
  VARIANT 71: note = Any amino acid
  VARIANT 72: note = Any amino acid
  VARIANT 73: note = Any amino acid
  VARIANT 74: note = Any amino acid
  VARIANT 75: note = Any amino acid
  VARIANT 76: note = Any amino acid
  VARIANT 77: note = Any amino acid
  VARIANT 78: note = Any amino acid
  VARIANT 79: note = Any amino acid
  VARIANT 80: note = Any amino acid
  VARIANT 81: note = Any amino acid
  VARIANT 82: note = Any amino acid
  VARIANT 83: note = Any amino acid
  VARIANT 84: note = Any amino acid
  VARIANT 85: note = Any amino acid
  VARIANT 86: note = Any amino acid
  VARIANT 87: note = Any amino acid
  VARIANT 88: note = Any amino acid
  VARIANT 89: note = Any amino acid
  VARIANT 90: note = Any amino acid
  VARIANT 91: note = Any amino acid
  VARIANT 92: note = Any amino acid
  VARIANT 93: note = Any amino acid
  VARIANT 94: note = Any amino acid
  VARIANT 96: note = Any amino acid
  VARIANT 98: note = Any amino acid
  VARIANT 99: note = Any amino acid
DXXXXXXXXXXXXXXXXXXXXXXXXXXXXXXXXXXXXXXXXXXXXXXXXXXXXXXXGXXXXXXXXXXXXXXXXXXXXXXXXXXXXXXXXXXXXXKXDXXD

SEQ ID NO: 796553 - protein, 88 aa, unidentified
  VARIANT 2: note = Any amino acid
  VARIANT 3: note = Any amino acid
  VARIANT 4: note = Any amino acid
  VARIANT 5: note = Any amino acid
  VARIANT 6: note = Any amino acid
  VARIANT 7: note = Any amino acid
  VARIANT 8: note = Any amino acid
  VARIANT 9: note = Any amino acid
  VARIANT 10: note = Any amino acid
  VARIANT 11: note = Any amino acid
  VARIANT 12: note = Any amino acid
  VARIANT 13: note = Any amino acid
  VARIANT 14: note = Any amino acid
  VARIANT 15: note = Any amino acid
  VARIANT 16: note = Any amino acid
  VARIANT 17: note = Any amino acid
  VARIANT 18: note = Any amino acid
  VARIANT 19: note = Any amino acid
  VARIANT 20: note = Any amino acid
  VARIANT 21: note = Any amino acid
  VARIANT 22: note = Any amino acid
  VARIANT 23: note = Any amino acid
  VARIANT 24: note = Any amino acid
  VARIANT 25: note = Any amino acid
  VARIANT 26: note = Any amino acid
  VARIANT 27: note = Any amino acid
  VARIANT 28: note = Any amino acid
  VARIANT 29: note = Any amino acid
  VARIANT 30: note = Any amino acid
  VARIANT 31: note = Any amino acid
  VARIANT 32: note = Any amino acid
  VARIANT 33: note = Any amino acid
  VARIANT 34: note = Any amino acid
  VARIANT 35: note = Any amino acid
  VARIANT 36: note = Any amino acid
  VARIANT 37: note = Any amino acid
  VARIANT 38: note = Any amino acid
  VARIANT 39: note = Any amino acid
  VARIANT 40: note = Any amino acid
  VARIANT 41: note = Any amino acid
  VARIANT 42: note = Any amino acid
  VARIANT 43: note = Any amino acid
  VARIANT 44: note = Any amino acid
  VARIANT 45: note = Any amino acid
  VARIANT 46: note = Any amino acid
  VARIANT 48: note = Any amino acid
  VARIANT 49: note = Any amino acid
  VARIANT 50: note = Any amino acid
  VARIANT 51: note = Any amino acid
  VARIANT 52: note = Any amino acid
  VARIANT 53: note = Any amino acid
  VARIANT 54: note = Any amino acid
  VARIANT 55: note = Any amino acid
  VARIANT 56: note = Any amino acid
  VARIANT 57: note = Any amino acid
  VARIANT 58: note = Any amino acid
  VARIANT 59: note = Any amino acid
  VARIANT 60: note = Any amino acid
  VARIANT 61: note = Any amino acid
  VARIANT 62: note = Any amino acid
  VARIANT 63: note = Any amino acid
  VARIANT 64: note = Any amino acid
  VARIANT 65: note = Any amino acid
  VARIANT 66: note = Any amino acid
  VARIANT 67: note = Any amino acid
  VARIANT 68: note = Any amino acid
  VARIANT 69: note = Any amino acid
  VARIANT 70: note = Any amino acid
  VARIANT 71: note = Any amino acid
  VARIANT 72: note = Any amino acid
  VARIANT 73: note = Any amino acid
  VARIANT 74: note = Any amino acid
  VARIANT 75: note = Any amino acid
  VARIANT 76: note = Any amino acid
  VARIANT 77: note = Any amino acid
  VARIANT 78: note = Any amino acid
  VARIANT 79: note = Any amino acid
  VARIANT 80: note = Any amino acid
  VARIANT 81: note = Any amino acid
  VARIANT 82: note = Any amino acid
  VARIANT 84: note = Any amino acid
  VARIANT 86: note = Any amino acid
  VARIANT 87: note = Any amino acid
DXXXXXXXXXXXXXXXXXXXXXXXXXXXXXXXXXXXXXXXXXXXXXEXXXXXXXXXXXXXXXXXXXXXXXXXXXXXXXXXXXMXDXXA

SEQ ID NO: 796554 - protein, 97 aa, unidentified
  VARIANT 2: note = Any amino acid
  VARIANT 3: note = Any amino acid
  VARIANT 4: note = Any amino acid
  VARIANT 5: note = Any amino acid
  VARIANT 6: note = Any amino acid
  VARIANT 7: note = Any amino acid
  VARIANT 8: note = Any amino acid
  VARIANT 9: note = Any amino acid
  VARIANT 10: note = Any amino acid
  VARIANT 11: note = Any amino acid
  VARIANT 12: note = Any amino acid
  VARIANT 13: note = Any amino acid
  VARIANT 14: note = Any amino acid
  VARIANT 15: note = Any amino acid
  VARIANT 16: note = Any amino acid
  VARIANT 17: note = Any amino acid
  VARIANT 18: note = Any amino acid
  VARIANT 19: note = Any amino acid
  VARIANT 20: note = Any amino acid
  VARIANT 21: note = Any amino acid
  VARIANT 22: note = Any amino acid
  VARIANT 23: note = Any amino acid
  VARIANT 24: note = Any amino acid
  VARIANT 25: note = Any amino acid
  VARIANT 26: note = Any amino acid
  VARIANT 27: note = Any amino acid
  VARIANT 28: note = Any amino acid
  VARIANT 29: note = Any amino acid
  VARIANT 30: note = Any amino acid
  VARIANT 31: note = Any amino acid
  VARIANT 32: note = Any amino acid
  VARIANT 33: note = Any amino acid
  VARIANT 34: note = Any amino acid
  VARIANT 35: note = Any amino acid
  VARIANT 36: note = Any amino acid
  VARIANT 37: note = Any amino acid
  VARIANT 38: note = Any amino acid
  VARIANT 39: note = Any amino acid
  VARIANT 40: note = Any amino acid
  VARIANT 41: note = Any amino acid
  VARIANT 42: note = Any amino acid
  VARIANT 43: note = Any amino acid
  VARIANT 44: note = Any amino acid
  VARIANT 45: note = Any amino acid
  VARIANT 46: note = Any amino acid
  VARIANT 47: note = Any amino acid
  VARIANT 48: note = Any amino acid
  VARIANT 49: note = Any amino acid
  VARIANT 50: note = Any amino acid
  VARIANT 51: note = Any amino acid
  VARIANT 52: note = Any amino acid
  VARIANT 53: note = Any amino acid
  VARIANT 54: note = Any amino acid
  VARIANT 55: note = Any amino acid
  VARIANT 57: note = Any amino acid
  VARIANT 58: note = Any amino acid
  VARIANT 59: note = Any amino acid
  VARIANT 60: note = Any amino acid
  VARIANT 61: note = Any amino acid
  VARIANT 62: note = Any amino acid
  VARIANT 63: note = Any amino acid
  VARIANT 64: note = Any amino acid
  VARIANT 65: note = Any amino acid
  VARIANT 66: note = Any amino acid
  VARIANT 67: note = Any amino acid
  VARIANT 68: note = Any amino acid
  VARIANT 69: note = Any amino acid
  VARIANT 70: note = Any amino acid
  VARIANT 71: note = Any amino acid
  VARIANT 72: note = Any amino acid
  VARIANT 73: note = Any amino acid
  VARIANT 74: note = Any amino acid
  VARIANT 75: note = Any amino acid
  VARIANT 76: note = Any amino acid
  VARIANT 77: note = Any amino acid
  VARIANT 78: note = Any amino acid
  VARIANT 79: note = Any amino acid
  VARIANT 80: note = Any amino acid
  VARIANT 81: note = Any amino acid
  VARIANT 82: note = Any amino acid
  VARIANT 83: note = Any amino acid
  VARIANT 84: note = Any amino acid
  VARIANT 85: note = Any amino acid
  VARIANT 86: note = Any amino acid
  VARIANT 87: note = Any amino acid
  VARIANT 88: note = Any amino acid
  VARIANT 89: note = Any amino acid
  VARIANT 90: note = Any amino acid
  VARIANT 91: note = Any amino acid
  VARIANT 93: note = Any amino acid
  VARIANT 95: note = Any amino acid
  VARIANT 96: note = Any amino acid
DXXXXXXXXXXXXXXXXXXXXXXXXXXXXXXXXXXXXXXXXXXXXXXXXXXXXXXEXXXXXXXXXXXXXXXXXXXXXXXXXXXXXXXXXXXKXDXXD

SEQ ID NO: 796555 - protein, 89 aa, unidentified
  VARIANT 2: note = Any amino acid
  VARIANT 3: note = Any amino acid
  VARIANT 4: note = Any amino acid
  VARIANT 5: note = Any amino acid
  VARIANT 6: note = Any amino acid
  VARIANT 7: note = Any amino acid
  VARIANT 8: note = Any amino acid
  VARIANT 9: note = Any amino acid
  VARIANT 10: note = Any amino acid
  VARIANT 11: note = Any amino acid
  VARIANT 12: note = Any amino acid
  VARIANT 13: note = Any amino acid
  VARIANT 14: note = Any amino acid
  VARIANT 15: note = Any amino acid
  VARIANT 16: note = Any amino acid
  VARIANT 17: note = Any amino acid
  VARIANT 18: note = Any amino acid
  VARIANT 19: note = Any amino acid
  VARIANT 20: note = Any amino acid
  VARIANT 21: note = Any amino acid
  VARIANT 22: note = Any amino acid
  VARIANT 23: note = Any amino acid
  VARIANT 24: note = Any amino acid
  VARIANT 25: note = Any amino acid
  VARIANT 26: note = Any amino acid
  VARIANT 27: note = Any amino acid
  VARIANT 28: note = Any amino acid
  VARIANT 29: note = Any amino acid
  VARIANT 30: note = Any amino acid
  VARIANT 31: note = Any amino acid
  VARIANT 32: note = Any amino acid
  VARIANT 33: note = Any amino acid
  VARIANT 34: note = Any amino acid
  VARIANT 35: note = Any amino acid
  VARIANT 36: note = Any amino acid
  VARIANT 37: note = Any amino acid
  VARIANT 38: note = Any amino acid
  VARIANT 39: note = Any amino acid
  VARIANT 40: note = Any amino acid
  VARIANT 41: note = Any amino acid
  VARIANT 42: note = Any amino acid
  VARIANT 43: note = Any amino acid
  VARIANT 44: note = Any amino acid
  VARIANT 45: note = Any amino acid
  VARIANT 46: note = Any amino acid
  VARIANT 48: note = Any amino acid
  VARIANT 49: note = Any amino acid
  VARIANT 50: note = Any amino acid
  VARIANT 51: note = Any amino acid
  VARIANT 52: note = Any amino acid
  VARIANT 53: note = Any amino acid
  VARIANT 54: note = Any amino acid
  VARIANT 55: note = Any amino acid
  VARIANT 56: note = Any amino acid
  VARIANT 57: note = Any amino acid
  VARIANT 58: note = Any amino acid
  VARIANT 59: note = Any amino acid
  VARIANT 60: note = Any amino acid
  VARIANT 61: note = Any amino acid
  VARIANT 62: note = Any amino acid
  VARIANT 63: note = Any amino acid
  VARIANT 64: note = Any amino acid
  VARIANT 65: note = Any amino acid
  VARIANT 66: note = Any amino acid
  VARIANT 67: note = Any amino acid
  VARIANT 68: note = Any amino acid
  VARIANT 69: note = Any amino acid
  VARIANT 70: note = Any amino acid
  VARIANT 71: note = Any amino acid
  VARIANT 72: note = Any amino acid
  VARIANT 73: note = Any amino acid
  VARIANT 74: note = Any amino acid
  VARIANT 75: note = Any amino acid
  VARIANT 76: note = Any amino acid
  VARIANT 77: note = Any amino acid
  VARIANT 78: note = Any amino acid
  VARIANT 79: note = Any amino acid
  VARIANT 80: note = Any amino acid
  VARIANT 81: note = Any amino acid
  VARIANT 82: note = Any amino acid
  VARIANT 83: note = Any amino acid
  VARIANT 85: note = Any amino acid
  VARIANT 87: note = Any amino acid
  VARIANT 88: note = Any amino acid
DXXXXXXXXXXXXXXXXXXXXXXXXXXXXXXXXXXXXXXXXXXXXXCXXXXXXXXXXXXXXXXXXXXXXXXXXXXXXXXXXXXKXDXXD

SEQ ID NO: 796556 - protein, 91 aa, unidentified
  VARIANT 2: note = Any amino acid
  VARIANT 3: note = Any amino acid
  VARIANT 4: note = Any amino acid
  VARIANT 5: note = Any amino acid
  VARIANT 6: note = Any amino acid
  VARIANT 7: note = Any amino acid
  VARIANT 8: note = Any amino acid
  VARIANT 9: note = Any amino acid
  VARIANT 10: note = Any amino acid
  VARIANT 11: note = Any amino acid
  VARIANT 12: note = Any amino acid
  VARIANT 13: note = Any amino acid
  VARIANT 14: note = Any amino acid
  VARIANT 15: note = Any amino acid
  VARIANT 16: note = Any amino acid
  VARIANT 17: note = Any amino acid
  VARIANT 18: note = Any amino acid
  VARIANT 19: note = Any amino acid
  VARIANT 20: note = Any amino acid
  VARIANT 21: note = Any amino acid
  VARIANT 22: note = Any amino acid
  VARIANT 23: note = Any amino acid
  VARIANT 24: note = Any amino acid
  VARIANT 25: note = Any amino acid
  VARIANT 26: note = Any amino acid
  VARIANT 27: note = Any amino acid
  VARIANT 28: note = Any amino acid
  VARIANT 29: note = Any amino acid
  VARIANT 30: note = Any amino acid
  VARIANT 31: note = Any amino acid
  VARIANT 32: note = Any amino acid
  VARIANT 33: note = Any amino acid
  VARIANT 34: note = Any amino acid
  VARIANT 35: note = Any amino acid
  VARIANT 36: note = Any amino acid
  VARIANT 37: note = Any amino acid
  VARIANT 38: note = Any amino acid
  VARIANT 39: note = Any amino acid
  VARIANT 40: note = Any amino acid
  VARIANT 41: note = Any amino acid
  VARIANT 42: note = Any amino acid
  VARIANT 43: note = Any amino acid
  VARIANT 44: note = Any amino acid
  VARIANT 45: note = Any amino acid
  VARIANT 46: note = Any amino acid
  VARIANT 47: note = Any amino acid
  VARIANT 49: note = Any amino acid
  VARIANT 50: note = Any amino acid
  VARIANT 51: note = Any amino acid
  VARIANT 52: note = Any amino acid
  VARIANT 53: note = Any amino acid
  VARIANT 54: note = Any amino acid
  VARIANT 55: note = Any amino acid
  VARIANT 56: note = Any amino acid
  VARIANT 57: note = Any amino acid
  VARIANT 58: note = Any amino acid
  VARIANT 59: note = Any amino acid
  VARIANT 60: note = Any amino acid
  VARIANT 61: note = Any amino acid
  VARIANT 62: note = Any amino acid
  VARIANT 63: note = Any amino acid
  VARIANT 64: note = Any amino acid
  VARIANT 65: note = Any amino acid
  VARIANT 66: note = Any amino acid
  VARIANT 67: note = Any amino acid
  VARIANT 68: note = Any amino acid
  VARIANT 69: note = Any amino acid
  VARIANT 70: note = Any amino acid
  VARIANT 71: note = Any amino acid
  VARIANT 72: note = Any amino acid
  VARIANT 73: note = Any amino acid
  VARIANT 74: note = Any amino acid
  VARIANT 75: note = Any amino acid
  VARIANT 76: note = Any amino acid
  VARIANT 77: note = Any amino acid
  VARIANT 78: note = Any amino acid
  VARIANT 79: note = Any amino acid
  VARIANT 80: note = Any amino acid
  VARIANT 81: note = Any amino acid
  VARIANT 82: note = Any amino acid
  VARIANT 83: note = Any amino acid
  VARIANT 84: note = Any amino acid
  VARIANT 85: note = Any amino acid
  VARIANT 87: note = Any amino acid
  VARIANT 89: note = Any amino acid
  VARIANT 90: note = Any amino acid
DXXXXXXXXXXXXXXXXXXXXXXXXXXXXXXXXXXXXXXXXXXXXXXYXXXXXXXXXXXXXXXXXXXXXXXXXXXXXXXXXXXXXKXDXXD

SEQ ID NO: 796557 - protein, 90 aa, unidentified
  VARIANT 2: note = Any amino acid
  VARIANT 3: note = Any amino acid
  VARIANT 4: note = Any amino acid
  VARIANT 5: note = Any amino acid
  VARIANT 6: note = Any amino acid
  VARIANT 7: note = Any amino acid
  VARIANT 8: note = Any amino acid
  VARIANT 9: note = Any amino acid
  VARIANT 10: note = Any amino acid
  VARIANT 11: note = Any amino acid
  VARIANT 12: note = Any amino acid
  VARIANT 13: note = Any amino acid
  VARIANT 14: note = Any amino acid
  VARIANT 15: note = Any amino acid
  VARIANT 16: note = Any amino acid
  VARIANT 17: note = Any amino acid
  VARIANT 18: note = Any amino acid
  VARIANT 19: note = Any amino acid
  VARIANT 20: note = Any amino acid
  VARIANT 21: note = Any amino acid
  VARIANT 22: note = Any amino acid
  VARIANT 23: note = Any amino acid
  VARIANT 24: note = Any amino acid
  VARIANT 25: note = Any amino acid
  VARIANT 26: note = Any amino acid
  VARIANT 27: note = Any amino acid
  VARIANT 28: note = Any amino acid
  VARIANT 29: note = Any amino acid
  VARIANT 30: note = Any amino acid
  VARIANT 31: note = Any amino acid
  VARIANT 32: note = Any amino acid
  VARIANT 33: note = Any amino acid
  VARIANT 34: note = Any amino acid
  VARIANT 35: note = Any amino acid
  VARIANT 36: note = Any amino acid
  VARIANT 37: note = Any amino acid
  VARIANT 38: note = Any amino acid
  VARIANT 39: note = Any amino acid
  VARIANT 40: note = Any amino acid
  VARIANT 41: note = Any amino acid
  VARIANT 42: note = Any amino acid
  VARIANT 43: note = Any amino acid
  VARIANT 44: note = Any amino acid
  VARIANT 45: note = Any amino acid
  VARIANT 46: note = Any amino acid
  VARIANT 47: note = Any amino acid
  VARIANT 48: note = Any amino acid
  VARIANT 49: note = Any amino acid
  VARIANT 51: note = Any amino acid
  VARIANT 52: note = Any amino acid
  VARIANT 53: note = Any amino acid
  VARIANT 54: note = Any amino acid
  VARIANT 55: note = Any amino acid
  VARIANT 56: note = Any amino acid
  VARIANT 57: note = Any amino acid
  VARIANT 58: note = Any amino acid
  VARIANT 59: note = Any amino acid
  VARIANT 60: note = Any amino acid
  VARIANT 61: note = Any amino acid
  VARIANT 62: note = Any amino acid
  VARIANT 63: note = Any amino acid
  VARIANT 64: note = Any amino acid
  VARIANT 65: note = Any amino acid
  VARIANT 66: note = Any amino acid
  VARIANT 67: note = Any amino acid
  VARIANT 68: note = Any amino acid
  VARIANT 69: note = Any amino acid
  VARIANT 70: note = Any amino acid
  VARIANT 71: note = Any amino acid
  VARIANT 72: note = Any amino acid
  VARIANT 73: note = Any amino acid
  VARIANT 74: note = Any amino acid
  VARIANT 75: note = Any amino acid
  VARIANT 76: note = Any amino acid
  VARIANT 77: note = Any amino acid
  VARIANT 78: note = Any amino acid
  VARIANT 79: note = Any amino acid
  VARIANT 80: note = Any amino acid
  VARIANT 81: note = Any amino acid
  VARIANT 82: note = Any amino acid
  VARIANT 83: note = Any amino acid
  VARIANT 84: note = Any amino acid
  VARIANT 86: note = Any amino acid
  VARIANT 88: note = Any amino acid
  VARIANT 89: note = Any amino acid
DXXXXXXXXXXXXXXXXXXXXXXXXXXXXXXXXXXXXXXXXXXXXXXXXAXXXXXXXXXXXXXXXXXXXXXXXXXXXXXXXXXXKXDXXD

SEQ ID NO: 796558 - protein, 89 aa, unidentified
  VARIANT 2: note = Any amino acid
  VARIANT 3: note = Any amino acid
  VARIANT 4: note = Any amino acid
  VARIANT 5: note = Any amino acid
  VARIANT 6: note = Any amino acid
  VARIANT 7: note = Any amino acid
  VARIANT 8: note = Any amino acid
  VARIANT 9: note = Any amino acid
  VARIANT 10: note = Any amino acid
  VARIANT 11: note = Any amino acid
  VARIANT 12: note = Any amino acid
  VARIANT 13: note = Any amino acid
  VARIANT 14: note = Any amino acid
  VARIANT 15: note = Any amino acid
  VARIANT 16: note = Any amino acid
  VARIANT 17: note = Any amino acid
  VARIANT 18: note = Any amino acid
  VARIANT 19: note = Any amino acid
  VARIANT 20: note = Any amino acid
  VARIANT 21: note = Any amino acid
  VARIANT 22: note = Any amino acid
  VARIANT 23: note = Any amino acid
  VARIANT 24: note = Any amino acid
  VARIANT 25: note = Any amino acid
  VARIANT 26: note = Any amino acid
  VARIANT 27: note = Any amino acid
  VARIANT 28: note = Any amino acid
  VARIANT 29: note = Any amino acid
  VARIANT 30: note = Any amino acid
  VARIANT 31: note = Any amino acid
  VARIANT 32: note = Any amino acid
  VARIANT 33: note = Any amino acid
  VARIANT 34: note = Any amino acid
  VARIANT 35: note = Any amino acid
  VARIANT 36: note = Any amino acid
  VARIANT 37: note = Any amino acid
  VARIANT 38: note = Any amino acid
  VARIANT 39: note = Any amino acid
  VARIANT 40: note = Any amino acid
  VARIANT 41: note = Any amino acid
  VARIANT 42: note = Any amino acid
  VARIANT 43: note = Any amino acid
  VARIANT 44: note = Any amino acid
  VARIANT 45: note = Any amino acid
  VARIANT 47: note = Any amino acid
  VARIANT 48: note = Any amino acid
  VARIANT 49: note = Any amino acid
  VARIANT 50: note = Any amino acid
  VARIANT 51: note = Any amino acid
  VARIANT 52: note = Any amino acid
  VARIANT 53: note = Any amino acid
  VARIANT 54: note = Any amino acid
  VARIANT 55: note = Any amino acid
  VARIANT 56: note = Any amino acid
  VARIANT 57: note = Any amino acid
  VARIANT 58: note = Any amino acid
  VARIANT 59: note = Any amino acid
  VARIANT 60: note = Any amino acid
  VARIANT 61: note = Any amino acid
  VARIANT 62: note = Any amino acid
  VARIANT 63: note = Any amino acid
  VARIANT 64: note = Any amino acid
  VARIANT 65: note = Any amino acid
  VARIANT 66: note = Any amino acid
  VARIANT 67: note = Any amino acid
  VARIANT 68: note = Any amino acid
  VARIANT 69: note = Any amino acid
  VARIANT 70: note = Any amino acid
  VARIANT 71: note = Any amino acid
  VARIANT 72: note = Any amino acid
  VARIANT 73: note = Any amino acid
  VARIANT 74: note = Any amino acid
  VARIANT 75: note = Any amino acid
  VARIANT 76: note = Any amino acid
  VARIANT 77: note = Any amino acid
  VARIANT 78: note = Any amino acid
  VARIANT 79: note = Any amino acid
  VARIANT 80: note = Any amino acid
  VARIANT 81: note = Any amino acid
  VARIANT 82: note = Any amino acid
  VARIANT 83: note = Any amino acid
  VARIANT 85: note = Any amino acid
  VARIANT 87: note = Any amino acid
  VARIANT 88: note = Any amino acid
DXXXXXXXXXXXXXXXXXXXXXXXXXXXXXXXXXXXXXXXXXXXXAXXXXXXXXXXXXXXXXXXXXXXXXXXXXXXXXXXXXXKXDXXD

SEQ ID NO: 796559 - protein, 91 aa, unidentified
  VARIANT 2: note = Any amino acid
  VARIANT 3: note = Any amino acid
  VARIANT 4: note = Any amino acid
  VARIANT 5: note = Any amino acid
  VARIANT 6: note = Any amino acid
  VARIANT 7: note = Any amino acid
  VARIANT 8: note = Any amino acid
  VARIANT 9: note = Any amino acid
  VARIANT 10: note = Any amino acid
  VARIANT 11: note = Any amino acid
  VARIANT 12: note = Any amino acid
  VARIANT 13: note = Any amino acid
  VARIANT 14: note = Any amino acid
  VARIANT 15: note = Any amino acid
  VARIANT 16: note = Any amino acid
  VARIANT 17: note = Any amino acid
  VARIANT 18: note = Any amino acid
  VARIANT 19: note = Any amino acid
  VARIANT 20: note = Any amino acid
  VARIANT 21: note = Any amino acid
  VARIANT 22: note = Any amino acid
  VARIANT 23: note = Any amino acid
  VARIANT 24: note = Any amino acid
  VARIANT 25: note = Any amino acid
  VARIANT 26: note = Any amino acid
  VARIANT 27: note = Any amino acid
  VARIANT 28: note = Any amino acid
  VARIANT 29: note = Any amino acid
  VARIANT 30: note = Any amino acid
  VARIANT 31: note = Any amino acid
  VARIANT 32: note = Any amino acid
  VARIANT 33: note = Any amino acid
  VARIANT 34: note = Any amino acid
  VARIANT 35: note = Any amino acid
  VARIANT 36: note = Any amino acid
  VARIANT 37: note = Any amino acid
  VARIANT 38: note = Any amino acid
  VARIANT 39: note = Any amino acid
  VARIANT 40: note = Any amino acid
  VARIANT 41: note = Any amino acid
  VARIANT 42: note = Any amino acid
  VARIANT 43: note = Any amino acid
  VARIANT 44: note = Any amino acid
  VARIANT 45: note = Any amino acid
  VARIANT 46: note = Any amino acid
  VARIANT 47: note = Any amino acid
  VARIANT 48: note = Any amino acid
  VARIANT 49: note = Any amino acid
  VARIANT 50: note = Any amino acid
  VARIANT 51: note = Any amino acid
  VARIANT 52: note = Any amino acid
  VARIANT 53: note = Any amino acid
  VARIANT 55: note = Any amino acid
  VARIANT 56: note = Any amino acid
  VARIANT 57: note = Any amino acid
  VARIANT 58: note = Any amino acid
  VARIANT 59: note = Any amino acid
  VARIANT 60: note = Any amino acid
  VARIANT 61: note = Any amino acid
  VARIANT 62: note = Any amino acid
  VARIANT 63: note = Any amino acid
  VARIANT 64: note = Any amino acid
  VARIANT 65: note = Any amino acid
  VARIANT 66: note = Any amino acid
  VARIANT 67: note = Any amino acid
  VARIANT 68: note = Any amino acid
  VARIANT 69: note = Any amino acid
  VARIANT 70: note = Any amino acid
  VARIANT 71: note = Any amino acid
  VARIANT 72: note = Any amino acid
  VARIANT 73: note = Any amino acid
  VARIANT 74: note = Any amino acid
  VARIANT 75: note = Any amino acid
  VARIANT 76: note = Any amino acid
  VARIANT 77: note = Any amino acid
  VARIANT 78: note = Any amino acid
  VARIANT 79: note = Any amino acid
  VARIANT 80: note = Any amino acid
  VARIANT 81: note = Any amino acid
  VARIANT 82: note = Any amino acid
  VARIANT 83: note = Any amino acid
  VARIANT 84: note = Any amino acid
  VARIANT 85: note = Any amino acid
  VARIANT 87: note = Any amino acid
  VARIANT 89: note = Any amino acid
  VARIANT 90: note = Any amino acid
DXXXXXXXXXXXXXXXXXXXXXXXXXXXXXXXXXXXXXXXXXXXXXXXXXXXXEXXXXXXXXXXXXXXXXXXXXXXXXXXXXXXXKXDXXD

SEQ ID NO: 796560 - protein, 90 aa, unidentified
  VARIANT 2: note = Any amino acid
  VARIANT 3: note = Any amino acid
  VARIANT 4: note = Any amino acid
  VARIANT 5: note = Any amino acid
  VARIANT 6: note = Any amino acid
  VARIANT 7: note = Any amino acid
  VARIANT 8: note = Any amino acid
  VARIANT 9: note = Any amino acid
  VARIANT 10: note = Any amino acid
  VARIANT 11: note = Any amino acid
  VARIANT 12: note = Any amino acid
  VARIANT 13: note = Any amino acid
  VARIANT 14: note = Any amino acid
  VARIANT 15: note = Any amino acid
  VARIANT 16: note = Any amino acid
  VARIANT 17: note = Any amino acid
  VARIANT 18: note = Any amino acid
  VARIANT 19: note = Any amino acid
  VARIANT 20: note = Any amino acid
  VARIANT 21: note = Any amino acid
  VARIANT 22: note = Any amino acid
  VARIANT 23: note = Any amino acid
  VARIANT 24: note = Any amino acid
  VARIANT 25: note = Any amino acid
  VARIANT 26: note = Any amino acid
  VARIANT 27: note = Any amino acid
  VARIANT 28: note = Any amino acid
  VARIANT 29: note = Any amino acid
  VARIANT 30: note = Any amino acid
  VARIANT 31: note = Any amino acid
  VARIANT 32: note = Any amino acid
  VARIANT 33: note = Any amino acid
  VARIANT 34: note = Any amino acid
  VARIANT 35: note = Any amino acid
  VARIANT 36: note = Any amino acid
  VARIANT 37: note = Any amino acid
  VARIANT 38: note = Any amino acid
  VARIANT 39: note = Any amino acid
  VARIANT 40: note = Any amino acid
  VARIANT 41: note = Any amino acid
  VARIANT 42: note = Any amino acid
  VARIANT 43: note = Any amino acid
  VARIANT 44: note = Any amino acid
  VARIANT 45: note = Any amino acid
  VARIANT 46: note = Any amino acid
  VARIANT 48: note = Any amino acid
  VARIANT 49: note = Any amino acid
  VARIANT 50: note = Any amino acid
  VARIANT 51: note = Any amino acid
  VARIANT 52: note = Any amino acid
  VARIANT 53: note = Any amino acid
  VARIANT 54: note = Any amino acid
  VARIANT 55: note = Any amino acid
  VARIANT 56: note = Any amino acid
  VARIANT 57: note = Any amino acid
  VARIANT 58: note = Any amino acid
  VARIANT 59: note = Any amino acid
  VARIANT 60: note = Any amino acid
  VARIANT 61: note = Any amino acid
  VARIANT 62: note = Any amino acid
  VARIANT 63: note = Any amino acid
  VARIANT 64: note = Any amino acid
  VARIANT 65: note = Any amino acid
  VARIANT 66: note = Any amino acid
  VARIANT 67: note = Any amino acid
  VARIANT 68: note = Any amino acid
  VARIANT 69: note = Any amino acid
  VARIANT 70: note = Any amino acid
  VARIANT 71: note = Any amino acid
  VARIANT 72: note = Any amino acid
  VARIANT 73: note = Any amino acid
  VARIANT 74: note = Any amino acid
  VARIANT 75: note = Any amino acid
  VARIANT 76: note = Any amino acid
  VARIANT 77: note = Any amino acid
  VARIANT 78: note = Any amino acid
  VARIANT 79: note = Any amino acid
  VARIANT 80: note = Any amino acid
  VARIANT 81: note = Any amino acid
  VARIANT 82: note = Any amino acid
  VARIANT 83: note = Any amino acid
  VARIANT 84: note = Any amino acid
  VARIANT 86: note = Any amino acid
  VARIANT 88: note = Any amino acid
  VARIANT 89: note = Any amino acid
DXXXXXXXXXXXXXXXXXXXXXXXXXXXXXXXXXXXXXXXXXXXXXFXXXXXXXXXXXXXXXXXXXXXXXXXXXXXXXXXXXXXKXDXXD

SEQ ID NO: 796561 - protein, 90 aa, unidentified
  VARIANT 2: note = Any amino acid
  VARIANT 3: note = Any amino acid
  VARIANT 4: note = Any amino acid
  VARIANT 5: note = Any amino acid
  VARIANT 6: note = Any amino acid
  VARIANT 7: note = Any amino acid
  VARIANT 8: note = Any amino acid
  VARIANT 9: note = Any amino acid
  VARIANT 10: note = Any amino acid
  VARIANT 11: note = Any amino acid
  VARIANT 12: note = Any amino acid
  VARIANT 13: note = Any amino acid
  VARIANT 14: note = Any amino acid
  VARIANT 15: note = Any amino acid
  VARIANT 16: note = Any amino acid
  VARIANT 17: note = Any amino acid
  VARIANT 18: note = Any amino acid
  VARIANT 19: note = Any amino acid
  VARIANT 20: note = Any amino acid
  VARIANT 21: note = Any amino acid
  VARIANT 22: note = Any amino acid
  VARIANT 23: note = Any amino acid
  VARIANT 24: note = Any amino acid
  VARIANT 25: note = Any amino acid
  VARIANT 26: note = Any amino acid
  VARIANT 27: note = Any amino acid
  VARIANT 28: note = Any amino acid
  VARIANT 29: note = Any amino acid
  VARIANT 30: note = Any amino acid
  VARIANT 31: note = Any amino acid
  VARIANT 32: note = Any amino acid
  VARIANT 33: note = Any amino acid
  VARIANT 34: note = Any amino acid
  VARIANT 35: note = Any amino acid
  VARIANT 36: note = Any amino acid
  VARIANT 37: note = Any amino acid
  VARIANT 38: note = Any amino acid
  VARIANT 39: note = Any amino acid
  VARIANT 40: note = Any amino acid
  VARIANT 41: note = Any amino acid
  VARIANT 42: note = Any amino acid
  VARIANT 43: note = Any amino acid
  VARIANT 44: note = Any amino acid
  VARIANT 45: note = Any amino acid
  VARIANT 47: note = Any amino acid
  VARIANT 48: note = Any amino acid
  VARIANT 49: note = Any amino acid
  VARIANT 50: note = Any amino acid
  VARIANT 51: note = Any amino acid
  VARIANT 52: note = Any amino acid
  VARIANT 53: note = Any amino acid
  VARIANT 54: note = Any amino acid
  VARIANT 55: note = Any amino acid
  VARIANT 56: note = Any amino acid
  VARIANT 57: note = Any amino acid
  VARIANT 58: note = Any amino acid
  VARIANT 59: note = Any amino acid
  VARIANT 60: note = Any amino acid
  VARIANT 61: note = Any amino acid
  VARIANT 62: note = Any amino acid
  VARIANT 63: note = Any amino acid
  VARIANT 64: note = Any amino acid
  VARIANT 65: note = Any amino acid
  VARIANT 66: note = Any amino acid
  VARIANT 67: note = Any amino acid
  VARIANT 68: note = Any amino acid
  VARIANT 69: note = Any amino acid
  VARIANT 70: note = Any amino acid
  VARIANT 71: note = Any amino acid
  VARIANT 72: note = Any amino acid
  VARIANT 73: note = Any amino acid
  VARIANT 74: note = Any amino acid
  VARIANT 75: note = Any amino acid
  VARIANT 76: note = Any amino acid
  VARIANT 77: note = Any amino acid
  VARIANT 78: note = Any amino acid
  VARIANT 79: note = Any amino acid
  VARIANT 80: note = Any amino acid
  VARIANT 81: note = Any amino acid
  VARIANT 82: note = Any amino acid
  VARIANT 83: note = Any amino acid
  VARIANT 84: note = Any amino acid
  VARIANT 86: note = Any amino acid
  VARIANT 88: note = Any amino acid
  VARIANT 89: note = Any amino acid
DXXXXXXXXXXXXXXXXXXXXXXXXXXXXXXXXXXXXXXXXXXXXGXXXXXXXXXXXXXXXXXXXXXXXXXXXXXXXXXXXXXXKXDXXD

SEQ ID NO: 796562 - protein, 84 aa, unidentified
  VARIANT 2: note = Any amino acid
  VARIANT 3: note = Any amino acid
  VARIANT 4: note = Any amino acid
  VARIANT 5: note = Any amino acid
  VARIANT 6: note = Any amino acid
  VARIANT 7: note = Any amino acid
  VARIANT 8: note = Any amino acid
  VARIANT 9: note = Any amino acid
  VARIANT 10: note = Any amino acid
  VARIANT 11: note = Any amino acid
  VARIANT 12: note = Any amino acid
  VARIANT 13: note = Any amino acid
  VARIANT 14: note = Any amino acid
  VARIANT 15: note = Any amino acid
  VARIANT 16: note = Any amino acid
  VARIANT 17: note = Any amino acid
  VARIANT 18: note = Any amino acid
  VARIANT 19: note = Any amino acid
  VARIANT 20: note = Any amino acid
  VARIANT 21: note = Any amino acid
  VARIANT 22: note = Any amino acid
  VARIANT 23: note = Any amino acid
  VARIANT 24: note = Any amino acid
  VARIANT 25: note = Any amino acid
  VARIANT 26: note = Any amino acid
  VARIANT 27: note = Any amino acid
  VARIANT 28: note = Any amino acid
  VARIANT 29: note = Any amino acid
  VARIANT 30: note = Any amino acid
  VARIANT 31: note = Any amino acid
  VARIANT 32: note = Any amino acid
  VARIANT 33: note = Any amino acid
  VARIANT 34: note = Any amino acid
  VARIANT 35: note = Any amino acid
  VARIANT 36: note = Any amino acid
  VARIANT 37: note = Any amino acid
  VARIANT 38: note = Any amino acid
  VARIANT 39: note = Any amino acid
  VARIANT 40: note = Any amino acid
  VARIANT 41: note = Any amino acid
  VARIANT 42: note = Any amino acid
  VARIANT 43: note = Any amino acid
  VARIANT 44: note = Any amino acid
  VARIANT 45: note = Any amino acid
  VARIANT 46: note = Any amino acid
  VARIANT 48: note = Any amino acid
  VARIANT 49: note = Any amino acid
  VARIANT 50: note = Any amino acid
  VARIANT 51: note = Any amino acid
  VARIANT 52: note = Any amino acid
  VARIANT 53: note = Any amino acid
  VARIANT 54: note = Any amino acid
  VARIANT 55: note = Any amino acid
  VARIANT 56: note = Any amino acid
  VARIANT 57: note = Any amino acid
  VARIANT 58: note = Any amino acid
  VARIANT 59: note = Any amino acid
  VARIANT 60: note = Any amino acid
  VARIANT 61: note = Any amino acid
  VARIANT 62: note = Any amino acid
  VARIANT 63: note = Any amino acid
  VARIANT 64: note = Any amino acid
  VARIANT 65: note = Any amino acid
  VARIANT 66: note = Any amino acid
  VARIANT 67: note = Any amino acid
  VARIANT 68: note = Any amino acid
  VARIANT 69: note = Any amino acid
  VARIANT 70: note = Any amino acid
  VARIANT 71: note = Any amino acid
  VARIANT 72: note = Any amino acid
  VARIANT 73: note = Any amino acid
  VARIANT 74: note = Any amino acid
  VARIANT 75: note = Any amino acid
  VARIANT 76: note = Any amino acid
  VARIANT 77: note = Any amino acid
  VARIANT 78: note = Any amino acid
  VARIANT 80: note = Any amino acid
  VARIANT 82: note = Any amino acid
  VARIANT 83: note = Any amino acid
DXXXXXXXXXXXXXXXXXXXXXXXXXXXXXXXXXXXXXXXXXXXXXEXXXXXXXXXXXXXXXXXXXXXXXXXXXXXXXKXDXXD

SEQ ID NO: 796563 - protein, 90 aa, unidentified
  VARIANT 2: note = Any amino acid
  VARIANT 3: note = Any amino acid
  VARIANT 4: note = Any amino acid
  VARIANT 5: note = Any amino acid
  VARIANT 6: note = Any amino acid
  VARIANT 7: note = Any amino acid
  VARIANT 8: note = Any amino acid
  VARIANT 9: note = Any amino acid
  VARIANT 10: note = Any amino acid
  VARIANT 11: note = Any amino acid
  VARIANT 12: note = Any amino acid
  VARIANT 13: note = Any amino acid
  VARIANT 14: note = Any amino acid
  VARIANT 15: note = Any amino acid
  VARIANT 16: note = Any amino acid
  VARIANT 17: note = Any amino acid
  VARIANT 18: note = Any amino acid
  VARIANT 19: note = Any amino acid
  VARIANT 20: note = Any amino acid
  VARIANT 21: note = Any amino acid
  VARIANT 22: note = Any amino acid
  VARIANT 23: note = Any amino acid
  VARIANT 24: note = Any amino acid
  VARIANT 25: note = Any amino acid
  VARIANT 26: note = Any amino acid
  VARIANT 27: note = Any amino acid
  VARIANT 28: note = Any amino acid
  VARIANT 29: note = Any amino acid
  VARIANT 30: note = Any amino acid
  VARIANT 31: note = Any amino acid
  VARIANT 32: note = Any amino acid
  VARIANT 33: note = Any amino acid
  VARIANT 34: note = Any amino acid
  VARIANT 35: note = Any amino acid
  VARIANT 36: note = Any amino acid
  VARIANT 37: note = Any amino acid
  VARIANT 38: note = Any amino acid
  VARIANT 39: note = Any amino acid
  VARIANT 40: note = Any amino acid
  VARIANT 41: note = Any amino acid
  VARIANT 42: note = Any amino acid
  VARIANT 43: note = Any amino acid
  VARIANT 44: note = Any amino acid
  VARIANT 45: note = Any amino acid
  VARIANT 47: note = Any amino acid
  VARIANT 48: note = Any amino acid
  VARIANT 49: note = Any amino acid
  VARIANT 50: note = Any amino acid
  VARIANT 51: note = Any amino acid
  VARIANT 52: note = Any amino acid
  VARIANT 53: note = Any amino acid
  VARIANT 54: note = Any amino acid
  VARIANT 55: note = Any amino acid
  VARIANT 56: note = Any amino acid
  VARIANT 57: note = Any amino acid
  VARIANT 58: note = Any amino acid
  VARIANT 59: note = Any amino acid
  VARIANT 60: note = Any amino acid
  VARIANT 61: note = Any amino acid
  VARIANT 62: note = Any amino acid
  VARIANT 63: note = Any amino acid
  VARIANT 64: note = Any amino acid
  VARIANT 65: note = Any amino acid
  VARIANT 66: note = Any amino acid
  VARIANT 67: note = Any amino acid
  VARIANT 68: note = Any amino acid
  VARIANT 69: note = Any amino acid
  VARIANT 70: note = Any amino acid
  VARIANT 71: note = Any amino acid
  VARIANT 72: note = Any amino acid
  VARIANT 73: note = Any amino acid
  VARIANT 74: note = Any amino acid
  VARIANT 75: note = Any amino acid
  VARIANT 76: note = Any amino acid
  VARIANT 77: note = Any amino acid
  VARIANT 78: note = Any amino acid
  VARIANT 79: note = Any amino acid
  VARIANT 80: note = Any amino acid
  VARIANT 81: note = Any amino acid
  VARIANT 82: note = Any amino acid
  VARIANT 83: note = Any amino acid
  VARIANT 84: note = Any amino acid
  VARIANT 86: note = Any amino acid
  VARIANT 88: note = Any amino acid
  VARIANT 89: note = Any amino acid
DXXXXXXXXXXXXXXXXXXXXXXXXXXXXXXXXXXXXXXXXXXXXFXXXXXXXXXXXXXXXXXXXXXXXXXXXXXXXXXXXXXXKXDXXD

SEQ ID NO: 796564 - protein, 87 aa, unidentified
  VARIANT 2: note = Any amino acid
  VARIANT 3: note = Any amino acid
  VARIANT 4: note = Any amino acid
  VARIANT 5: note = Any amino acid
  VARIANT 6: note = Any amino acid
  VARIANT 7: note = Any amino acid
  VARIANT 8: note = Any amino acid
  VARIANT 9: note = Any amino acid
  VARIANT 10: note = Any amino acid
  VARIANT 11: note = Any amino acid
  VARIANT 12: note = Any amino acid
  VARIANT 13: note = Any amino acid
  VARIANT 14: note = Any amino acid
  VARIANT 15: note = Any amino acid
  VARIANT 16: note = Any amino acid
  VARIANT 17: note = Any amino acid
  VARIANT 18: note = Any amino acid
  VARIANT 19: note = Any amino acid
  VARIANT 20: note = Any amino acid
  VARIANT 21: note = Any amino acid
  VARIANT 22: note = Any amino acid
  VARIANT 23: note = Any amino acid
  VARIANT 24: note = Any amino acid
  VARIANT 25: note = Any amino acid
  VARIANT 26: note = Any amino acid
  VARIANT 27: note = Any amino acid
  VARIANT 28: note = Any amino acid
  VARIANT 29: note = Any amino acid
  VARIANT 30: note = Any amino acid
  VARIANT 31: note = Any amino acid
  VARIANT 32: note = Any amino acid
  VARIANT 33: note = Any amino acid
  VARIANT 34: note = Any amino acid
  VARIANT 35: note = Any amino acid
  VARIANT 36: note = Any amino acid
  VARIANT 37: note = Any amino acid
  VARIANT 38: note = Any amino acid
  VARIANT 39: note = Any amino acid
  VARIANT 40: note = Any amino acid
  VARIANT 41: note = Any amino acid
  VARIANT 42: note = Any amino acid
  VARIANT 43: note = Any amino acid
  VARIANT 44: note = Any amino acid
  VARIANT 45: note = Any amino acid
  VARIANT 46: note = Any amino acid
  VARIANT 48: note = Any amino acid
  VARIANT 49: note = Any amino acid
  VARIANT 50: note = Any amino acid
  VARIANT 51: note = Any amino acid
  VARIANT 52: note = Any amino acid
  VARIANT 53: note = Any amino acid
  VARIANT 54: note = Any amino acid
  VARIANT 55: note = Any amino acid
  VARIANT 56: note = Any amino acid
  VARIANT 57: note = Any amino acid
  VARIANT 58: note = Any amino acid
  VARIANT 59: note = Any amino acid
  VARIANT 60: note = Any amino acid
  VARIANT 61: note = Any amino acid
  VARIANT 62: note = Any amino acid
  VARIANT 63: note = Any amino acid
  VARIANT 64: note = Any amino acid
  VARIANT 65: note = Any amino acid
  VARIANT 66: note = Any amino acid
  VARIANT 67: note = Any amino acid
  VARIANT 68: note = Any amino acid
  VARIANT 69: note = Any amino acid
  VARIANT 70: note = Any amino acid
  VARIANT 71: note = Any amino acid
  VARIANT 72: note = Any amino acid
  VARIANT 73: note = Any amino acid
  VARIANT 74: note = Any amino acid
  VARIANT 75: note = Any amino acid
  VARIANT 76: note = Any amino acid
  VARIANT 77: note = Any amino acid
  VARIANT 78: note = Any amino acid
  VARIANT 79: note = Any amino acid
  VARIANT 80: note = Any amino acid
  VARIANT 81: note = Any amino acid
  VARIANT 83: note = Any amino acid
  VARIANT 85: note = Any amino acid
  VARIANT 86: note = Any amino acid
DXXXXXXXXXXXXXXXXXXXXXXXXXXXXXXXXXXXXXXXXXXXXXEXXXXXXXXXXXXXXXXXXXXXXXXXXXXXXXXXXQXDXXD

SEQ ID NO: 796565 - protein, 88 aa, unidentified
  VARIANT 2: note = Any amino acid
  VARIANT 3: note = Any amino acid
  VARIANT 4: note = Any amino acid
  VARIANT 5: note = Any amino acid
  VARIANT 6: note = Any amino acid
  VARIANT 7: note = Any amino acid
  VARIANT 8: note = Any amino acid
  VARIANT 9: note = Any amino acid
  VARIANT 10: note = Any amino acid
  VARIANT 11: note = Any amino acid
  VARIANT 12: note = Any amino acid
  VARIANT 13: note = Any amino acid
  VARIANT 14: note = Any amino acid
  VARIANT 15: note = Any amino acid
  VARIANT 16: note = Any amino acid
  VARIANT 17: note = Any amino acid
  VARIANT 18: note = Any amino acid
  VARIANT 19: note = Any amino acid
  VARIANT 20: note = Any amino acid
  VARIANT 21: note = Any amino acid
  VARIANT 22: note = Any amino acid
  VARIANT 23: note = Any amino acid
  VARIANT 24: note = Any amino acid
  VARIANT 25: note = Any amino acid
  VARIANT 26: note = Any amino acid
  VARIANT 27: note = Any amino acid
  VARIANT 28: note = Any amino acid
  VARIANT 29: note = Any amino acid
  VARIANT 30: note = Any amino acid
  VARIANT 31: note = Any amino acid
  VARIANT 32: note = Any amino acid
  VARIANT 33: note = Any amino acid
  VARIANT 34: note = Any amino acid
  VARIANT 35: note = Any amino acid
  VARIANT 36: note = Any amino acid
  VARIANT 37: note = Any amino acid
  VARIANT 38: note = Any amino acid
  VARIANT 39: note = Any amino acid
  VARIANT 40: note = Any amino acid
  VARIANT 41: note = Any amino acid
  VARIANT 42: note = Any amino acid
  VARIANT 43: note = Any amino acid
  VARIANT 44: note = Any amino acid
  VARIANT 45: note = Any amino acid
  VARIANT 46: note = Any amino acid
  VARIANT 48: note = Any amino acid
  VARIANT 49: note = Any amino acid
  VARIANT 50: note = Any amino acid
  VARIANT 51: note = Any amino acid
  VARIANT 52: note = Any amino acid
  VARIANT 53: note = Any amino acid
  VARIANT 54: note = Any amino acid
  VARIANT 55: note = Any amino acid
  VARIANT 56: note = Any amino acid
  VARIANT 57: note = Any amino acid
  VARIANT 58: note = Any amino acid
  VARIANT 59: note = Any amino acid
  VARIANT 60: note = Any amino acid
  VARIANT 61: note = Any amino acid
  VARIANT 62: note = Any amino acid
  VARIANT 63: note = Any amino acid
  VARIANT 64: note = Any amino acid
  VARIANT 65: note = Any amino acid
  VARIANT 66: note = Any amino acid
  VARIANT 67: note = Any amino acid
  VARIANT 68: note = Any amino acid
  VARIANT 69: note = Any amino acid
  VARIANT 70: note = Any amino acid
  VARIANT 71: note = Any amino acid
  VARIANT 72: note = Any amino acid
  VARIANT 73: note = Any amino acid
  VARIANT 74: note = Any amino acid
  VARIANT 75: note = Any amino acid
  VARIANT 76: note = Any amino acid
  VARIANT 77: note = Any amino acid
  VARIANT 78: note = Any amino acid
  VARIANT 79: note = Any amino acid
  VARIANT 80: note = Any amino acid
  VARIANT 81: note = Any amino acid
  VARIANT 82: note = Any amino acid
  VARIANT 84: note = Any amino acid
  VARIANT 86: note = Any amino acid
  VARIANT 87: note = Any amino acid
DXXXXXXXXXXXXXXXXXXXXXXXXXXXXXXXXXXXXXXXXXXXXXEXXXXXXXXXXXXXXXXXXXXXXXXXXXXXXXXXXXRXDXXD

SEQ ID NO: 796566 - protein, 89 aa, unidentified
  VARIANT 2: note = Any amino acid
  VARIANT 3: note = Any amino acid
  VARIANT 4: note = Any amino acid
  VARIANT 5: note = Any amino acid
  VARIANT 6: note = Any amino acid
  VARIANT 7: note = Any amino acid
  VARIANT 8: note = Any amino acid
  VARIANT 9: note = Any amino acid
  VARIANT 10: note = Any amino acid
  VARIANT 11: note = Any amino acid
  VARIANT 12: note = Any amino acid
  VARIANT 13: note = Any amino acid
  VARIANT 14: note = Any amino acid
  VARIANT 15: note = Any amino acid
  VARIANT 16: note = Any amino acid
  VARIANT 17: note = Any amino acid
  VARIANT 18: note = Any amino acid
  VARIANT 19: note = Any amino acid
  VARIANT 20: note = Any amino acid
  VARIANT 21: note = Any amino acid
  VARIANT 22: note = Any amino acid
  VARIANT 23: note = Any amino acid
  VARIANT 24: note = Any amino acid
  VARIANT 25: note = Any amino acid
  VARIANT 26: note = Any amino acid
  VARIANT 27: note = Any amino acid
  VARIANT 28: note = Any amino acid
  VARIANT 29: note = Any amino acid
  VARIANT 30: note = Any amino acid
  VARIANT 31: note = Any amino acid
  VARIANT 32: note = Any amino acid
  VARIANT 33: note = Any amino acid
  VARIANT 34: note = Any amino acid
  VARIANT 35: note = Any amino acid
  VARIANT 36: note = Any amino acid
  VARIANT 37: note = Any amino acid
  VARIANT 38: note = Any amino acid
  VARIANT 39: note = Any amino acid
  VARIANT 40: note = Any amino acid
  VARIANT 41: note = Any amino acid
  VARIANT 42: note = Any amino acid
  VARIANT 43: note = Any amino acid
  VARIANT 44: note = Any amino acid
  VARIANT 45: note = Any amino acid
  VARIANT 47: note = Any amino acid
  VARIANT 48: note = Any amino acid
  VARIANT 49: note = Any amino acid
  VARIANT 50: note = Any amino acid
  VARIANT 51: note = Any amino acid
  VARIANT 52: note = Any amino acid
  VARIANT 53: note = Any amino acid
  VARIANT 54: note = Any amino acid
  VARIANT 55: note = Any amino acid
  VARIANT 56: note = Any amino acid
  VARIANT 57: note = Any amino acid
  VARIANT 58: note = Any amino acid
  VARIANT 59: note = Any amino acid
  VARIANT 60: note = Any amino acid
  VARIANT 61: note = Any amino acid
  VARIANT 62: note = Any amino acid
  VARIANT 63: note = Any amino acid
  VARIANT 64: note = Any amino acid
  VARIANT 65: note = Any amino acid
  VARIANT 66: note = Any amino acid
  VARIANT 67: note = Any amino acid
  VARIANT 68: note = Any amino acid
  VARIANT 69: note = Any amino acid
  VARIANT 70: note = Any amino acid
  VARIANT 71: note = Any amino acid
  VARIANT 72: note = Any amino acid
  VARIANT 73: note = Any amino acid
  VARIANT 74: note = Any amino acid
  VARIANT 75: note = Any amino acid
  VARIANT 76: note = Any amino acid
  VARIANT 77: note = Any amino acid
  VARIANT 78: note = Any amino acid
  VARIANT 79: note = Any amino acid
  VARIANT 80: note = Any amino acid
  VARIANT 81: note = Any amino acid
  VARIANT 82: note = Any amino acid
  VARIANT 83: note = Any amino acid
  VARIANT 85: note = Any amino acid
  VARIANT 87: note = Any amino acid
  VARIANT 88: note = Any amino acid
DXXXXXXXXXXXXXXXXXXXXXXXXXXXXXXXXXXXXXXXXXXXXAXXXXXXXXXXXXXXXXXXXXXXXXXXXXXXXXXXXXXKXNXXD

SEQ ID NO: 796567 - protein, 88 aa, unidentified
  VARIANT 2: note = Any amino acid
  VARIANT 3: note = Any amino acid
  VARIANT 4: note = Any amino acid
  VARIANT 5: note = Any amino acid
  VARIANT 6: note = Any amino acid
  VARIANT 7: note = Any amino acid
  VARIANT 8: note = Any amino acid
  VARIANT 9: note = Any amino acid
  VARIANT 10: note = Any amino acid
  VARIANT 11: note = Any amino acid
  VARIANT 12: note = Any amino acid
  VARIANT 13: note = Any amino acid
  VARIANT 14: note = Any amino acid
  VARIANT 15: note = Any amino acid
  VARIANT 16: note = Any amino acid
  VARIANT 17: note = Any amino acid
  VARIANT 18: note = Any amino acid
  VARIANT 19: note = Any amino acid
  VARIANT 20: note = Any amino acid
  VARIANT 21: note = Any amino acid
  VARIANT 22: note = Any amino acid
  VARIANT 23: note = Any amino acid
  VARIANT 24: note = Any amino acid
  VARIANT 25: note = Any amino acid
  VARIANT 26: note = Any amino acid
  VARIANT 27: note = Any amino acid
  VARIANT 28: note = Any amino acid
  VARIANT 29: note = Any amino acid
  VARIANT 30: note = Any amino acid
  VARIANT 31: note = Any amino acid
  VARIANT 32: note = Any amino acid
  VARIANT 33: note = Any amino acid
  VARIANT 34: note = Any amino acid
  VARIANT 35: note = Any amino acid
  VARIANT 36: note = Any amino acid
  VARIANT 37: note = Any amino acid
  VARIANT 38: note = Any amino acid
  VARIANT 39: note = Any amino acid
  VARIANT 40: note = Any amino acid
  VARIANT 41: note = Any amino acid
  VARIANT 42: note = Any amino acid
  VARIANT 43: note = Any amino acid
  VARIANT 44: note = Any amino acid
  VARIANT 45: note = Any amino acid
  VARIANT 47: note = Any amino acid
  VARIANT 48: note = Any amino acid
  VARIANT 49: note = Any amino acid
  VARIANT 50: note = Any amino acid
  VARIANT 51: note = Any amino acid
  VARIANT 52: note = Any amino acid
  VARIANT 53: note = Any amino acid
  VARIANT 54: note = Any amino acid
  VARIANT 55: note = Any amino acid
  VARIANT 56: note = Any amino acid
  VARIANT 57: note = Any amino acid
  VARIANT 58: note = Any amino acid
  VARIANT 59: note = Any amino acid
  VARIANT 60: note = Any amino acid
  VARIANT 61: note = Any amino acid
  VARIANT 62: note = Any amino acid
  VARIANT 63: note = Any amino acid
  VARIANT 64: note = Any amino acid
  VARIANT 65: note = Any amino acid
  VARIANT 66: note = Any amino acid
  VARIANT 67: note = Any amino acid
  VARIANT 68: note = Any amino acid
  VARIANT 69: note = Any amino acid
  VARIANT 70: note = Any amino acid
  VARIANT 71: note = Any amino acid
  VARIANT 72: note = Any amino acid
  VARIANT 73: note = Any amino acid
  VARIANT 74: note = Any amino acid
  VARIANT 75: note = Any amino acid
  VARIANT 76: note = Any amino acid
  VARIANT 77: note = Any amino acid
  VARIANT 78: note = Any amino acid
  VARIANT 79: note = Any amino acid
  VARIANT 80: note = Any amino acid
  VARIANT 81: note = Any amino acid
  VARIANT 82: note = Any amino acid
  VARIANT 84: note = Any amino acid
  VARIANT 86: note = Any amino acid
  VARIANT 87: note = Any amino acid
DXXXXXXXXXXXXXXXXXXXXXXXXXXXXXXXXXXXXXXXXXXXXLXXXXXXXXXXXXXXXXXXXXXXXXXXXXXXXXXXXXKXDXXD

SEQ ID NO: 796568 - protein, 93 aa, unidentified
  VARIANT 2: note = Any amino acid
  VARIANT 3: note = Any amino acid
  VARIANT 4: note = Any amino acid
  VARIANT 5: note = Any amino acid
  VARIANT 6: note = Any amino acid
  VARIANT 7: note = Any amino acid
  VARIANT 8: note = Any amino acid
  VARIANT 9: note = Any amino acid
  VARIANT 10: note = Any amino acid
  VARIANT 11: note = Any amino acid
  VARIANT 12: note = Any amino acid
  VARIANT 13: note = Any amino acid
  VARIANT 14: note = Any amino acid
  VARIANT 15: note = Any amino acid
  VARIANT 16: note = Any amino acid
  VARIANT 17: note = Any amino acid
  VARIANT 18: note = Any amino acid
  VARIANT 19: note = Any amino acid
  VARIANT 20: note = Any amino acid
  VARIANT 21: note = Any amino acid
  VARIANT 22: note = Any amino acid
  VARIANT 23: note = Any amino acid
  VARIANT 24: note = Any amino acid
  VARIANT 25: note = Any amino acid
  VARIANT 26: note = Any amino acid
  VARIANT 27: note = Any amino acid
  VARIANT 28: note = Any amino acid
  VARIANT 29: note = Any amino acid
  VARIANT 30: note = Any amino acid
  VARIANT 31: note = Any amino acid
  VARIANT 32: note = Any amino acid
  VARIANT 33: note = Any amino acid
  VARIANT 34: note = Any amino acid
  VARIANT 35: note = Any amino acid
  VARIANT 36: note = Any amino acid
  VARIANT 37: note = Any amino acid
  VARIANT 38: note = Any amino acid
  VARIANT 39: note = Any amino acid
  VARIANT 40: note = Any amino acid
  VARIANT 41: note = Any amino acid
  VARIANT 42: note = Any amino acid
  VARIANT 43: note = Any amino acid
  VARIANT 44: note = Any amino acid
  VARIANT 45: note = Any amino acid
  VARIANT 46: note = Any amino acid
  VARIANT 47: note = Any amino acid
  VARIANT 48: note = Any amino acid
  VARIANT 49: note = Any amino acid
  VARIANT 50: note = Any amino acid
  VARIANT 52: note = Any amino acid
  VARIANT 53: note = Any amino acid
  VARIANT 54: note = Any amino acid
  VARIANT 55: note = Any amino acid
  VARIANT 56: note = Any amino acid
  VARIANT 57: note = Any amino acid
  VARIANT 58: note = Any amino acid
  VARIANT 59: note = Any amino acid
  VARIANT 60: note = Any amino acid
  VARIANT 61: note = Any amino acid
  VARIANT 62: note = Any amino acid
  VARIANT 63: note = Any amino acid
  VARIANT 64: note = Any amino acid
  VARIANT 65: note = Any amino acid
  VARIANT 66: note = Any amino acid
  VARIANT 67: note = Any amino acid
  VARIANT 68: note = Any amino acid
  VARIANT 69: note = Any amino acid
  VARIANT 70: note = Any amino acid
  VARIANT 71: note = Any amino acid
  VARIANT 72: note = Any amino acid
  VARIANT 73: note = Any amino acid
  VARIANT 74: note = Any amino acid
  VARIANT 75: note = Any amino acid
  VARIANT 76: note = Any amino acid
  VARIANT 77: note = Any amino acid
  VARIANT 78: note = Any amino acid
  VARIANT 79: note = Any amino acid
  VARIANT 80: note = Any amino acid
  VARIANT 81: note = Any amino acid
  VARIANT 82: note = Any amino acid
  VARIANT 83: note = Any amino acid
  VARIANT 84: note = Any amino acid
  VARIANT 85: note = Any amino acid
  VARIANT 86: note = Any amino acid
  VARIANT 87: note = Any amino acid
  VARIANT 89: note = Any amino acid
  VARIANT 91: note = Any amino acid
  VARIANT 92: note = Any amino acid
DXXXXXXXXXXXXXXXXXXXXXXXXXXXXXXXXXXXXXXXXXXXXXXXXXYXXXXXXXXXXXXXXXXXXXXXXXXXXXXXXXXXXXXKXNXXD

SEQ ID NO: 796569 - protein, 90 aa, unidentified
  VARIANT 2: note = Any amino acid
  VARIANT 3: note = Any amino acid
  VARIANT 4: note = Any amino acid
  VARIANT 5: note = Any amino acid
  VARIANT 6: note = Any amino acid
  VARIANT 7: note = Any amino acid
  VARIANT 8: note = Any amino acid
  VARIANT 9: note = Any amino acid
  VARIANT 10: note = Any amino acid
  VARIANT 11: note = Any amino acid
  VARIANT 12: note = Any amino acid
  VARIANT 13: note = Any amino acid
  VARIANT 14: note = Any amino acid
  VARIANT 15: note = Any amino acid
  VARIANT 16: note = Any amino acid
  VARIANT 17: note = Any amino acid
  VARIANT 18: note = Any amino acid
  VARIANT 19: note = Any amino acid
  VARIANT 20: note = Any amino acid
  VARIANT 21: note = Any amino acid
  VARIANT 22: note = Any amino acid
  VARIANT 23: note = Any amino acid
  VARIANT 24: note = Any amino acid
  VARIANT 25: note = Any amino acid
  VARIANT 26: note = Any amino acid
  VARIANT 27: note = Any amino acid
  VARIANT 28: note = Any amino acid
  VARIANT 29: note = Any amino acid
  VARIANT 30: note = Any amino acid
  VARIANT 31: note = Any amino acid
  VARIANT 32: note = Any amino acid
  VARIANT 33: note = Any amino acid
  VARIANT 34: note = Any amino acid
  VARIANT 35: note = Any amino acid
  VARIANT 36: note = Any amino acid
  VARIANT 37: note = Any amino acid
  VARIANT 38: note = Any amino acid
  VARIANT 39: note = Any amino acid
  VARIANT 40: note = Any amino acid
  VARIANT 41: note = Any amino acid
  VARIANT 42: note = Any amino acid
  VARIANT 43: note = Any amino acid
  VARIANT 44: note = Any amino acid
  VARIANT 45: note = Any amino acid
  VARIANT 47: note = Any amino acid
  VARIANT 48: note = Any amino acid
  VARIANT 49: note = Any amino acid
  VARIANT 50: note = Any amino acid
  VARIANT 51: note = Any amino acid
  VARIANT 52: note = Any amino acid
  VARIANT 53: note = Any amino acid
  VARIANT 54: note = Any amino acid
  VARIANT 55: note = Any amino acid
  VARIANT 56: note = Any amino acid
  VARIANT 57: note = Any amino acid
  VARIANT 58: note = Any amino acid
  VARIANT 59: note = Any amino acid
  VARIANT 60: note = Any amino acid
  VARIANT 61: note = Any amino acid
  VARIANT 62: note = Any amino acid
  VARIANT 63: note = Any amino acid
  VARIANT 64: note = Any amino acid
  VARIANT 65: note = Any amino acid
  VARIANT 66: note = Any amino acid
  VARIANT 67: note = Any amino acid
  VARIANT 68: note = Any amino acid
  VARIANT 69: note = Any amino acid
  VARIANT 70: note = Any amino acid
  VARIANT 71: note = Any amino acid
  VARIANT 72: note = Any amino acid
  VARIANT 73: note = Any amino acid
  VARIANT 74: note = Any amino acid
  VARIANT 75: note = Any amino acid
  VARIANT 76: note = Any amino acid
  VARIANT 77: note = Any amino acid
  VARIANT 78: note = Any amino acid
  VARIANT 79: note = Any amino acid
  VARIANT 80: note = Any amino acid
  VARIANT 81: note = Any amino acid
  VARIANT 82: note = Any amino acid
  VARIANT 83: note = Any amino acid
  VARIANT 84: note = Any amino acid
  VARIANT 86: note = Any amino acid
  VARIANT 88: note = Any amino acid
  VARIANT 89: note = Any amino acid
DXXXXXXXXXXXXXXXXXXXXXXXXXXXXXXXXXXXXXXXXXXXXCXXXXXXXXXXXXXXXXXXXXXXXXXXXXXXXXXXXXXXKXDXXD

SEQ ID NO: 796570 - protein, 89 aa, unidentified
  VARIANT 2: note = Any amino acid
  VARIANT 3: note = Any amino acid
  VARIANT 4: note = Any amino acid
  VARIANT 5: note = Any amino acid
  VARIANT 6: note = Any amino acid
  VARIANT 7: note = Any amino acid
  VARIANT 8: note = Any amino acid
  VARIANT 9: note = Any amino acid
  VARIANT 10: note = Any amino acid
  VARIANT 11: note = Any amino acid
  VARIANT 12: note = Any amino acid
  VARIANT 13: note = Any amino acid
  VARIANT 14: note = Any amino acid
  VARIANT 15: note = Any amino acid
  VARIANT 16: note = Any amino acid
  VARIANT 17: note = Any amino acid
  VARIANT 18: note = Any amino acid
  VARIANT 19: note = Any amino acid
  VARIANT 20: note = Any amino acid
  VARIANT 21: note = Any amino acid
  VARIANT 22: note = Any amino acid
  VARIANT 23: note = Any amino acid
  VARIANT 24: note = Any amino acid
  VARIANT 25: note = Any amino acid
  VARIANT 26: note = Any amino acid
  VARIANT 27: note = Any amino acid
  VARIANT 28: note = Any amino acid
  VARIANT 29: note = Any amino acid
  VARIANT 30: note = Any amino acid
  VARIANT 31: note = Any amino acid
  VARIANT 32: note = Any amino acid
  VARIANT 33: note = Any amino acid
  VARIANT 34: note = Any amino acid
  VARIANT 35: note = Any amino acid
  VARIANT 36: note = Any amino acid
  VARIANT 37: note = Any amino acid
  VARIANT 38: note = Any amino acid
  VARIANT 39: note = Any amino acid
  VARIANT 40: note = Any amino acid
  VARIANT 41: note = Any amino acid
  VARIANT 42: note = Any amino acid
  VARIANT 43: note = Any amino acid
  VARIANT 44: note = Any amino acid
  VARIANT 45: note = Any amino acid
  VARIANT 46: note = Any amino acid
  VARIANT 48: note = Any amino acid
  VARIANT 49: note = Any amino acid
  VARIANT 50: note = Any amino acid
  VARIANT 51: note = Any amino acid
  VARIANT 52: note = Any amino acid
  VARIANT 53: note = Any amino acid
  VARIANT 54: note = Any amino acid
  VARIANT 55: note = Any amino acid
  VARIANT 56: note = Any amino acid
  VARIANT 57: note = Any amino acid
  VARIANT 58: note = Any amino acid
  VARIANT 59: note = Any amino acid
  VARIANT 60: note = Any amino acid
  VARIANT 61: note = Any amino acid
  VARIANT 62: note = Any amino acid
  VARIANT 63: note = Any amino acid
  VARIANT 64: note = Any amino acid
  VARIANT 65: note = Any amino acid
  VARIANT 66: note = Any amino acid
  VARIANT 67: note = Any amino acid
  VARIANT 68: note = Any amino acid
  VARIANT 69: note = Any amino acid
  VARIANT 70: note = Any amino acid
  VARIANT 71: note = Any amino acid
  VARIANT 72: note = Any amino acid
  VARIANT 73: note = Any amino acid
  VARIANT 74: note = Any amino acid
  VARIANT 75: note = Any amino acid
  VARIANT 76: note = Any amino acid
  VARIANT 77: note = Any amino acid
  VARIANT 78: note = Any amino acid
  VARIANT 79: note = Any amino acid
  VARIANT 80: note = Any amino acid
  VARIANT 81: note = Any amino acid
  VARIANT 82: note = Any amino acid
  VARIANT 83: note = Any amino acid
  VARIANT 85: note = Any amino acid
  VARIANT 87: note = Any amino acid
  VARIANT 88: note = Any amino acid
DXXXXXXXXXXXXXXXXXXXXXXXXXXXXXXXXXXXXXXXXXXXXXLXXXXXXXXXXXXXXXXXXXXXXXXXXXXXXXXXXXXKXDXXD

SEQ ID NO: 796571 - protein, 90 aa, unidentified
  VARIANT 2: note = Any amino acid
  VARIANT 3: note = Any amino acid
  VARIANT 4: note = Any amino acid
  VARIANT 5: note = Any amino acid
  VARIANT 6: note = Any amino acid
  VARIANT 7: note = Any amino acid
  VARIANT 8: note = Any amino acid
  VARIANT 9: note = Any amino acid
  VARIANT 10: note = Any amino acid
  VARIANT 11: note = Any amino acid
  VARIANT 12: note = Any amino acid
  VARIANT 13: note = Any amino acid
  VARIANT 14: note = Any amino acid
  VARIANT 15: note = Any amino acid
  VARIANT 16: note = Any amino acid
  VARIANT 17: note = Any amino acid
  VARIANT 18: note = Any amino acid
  VARIANT 19: note = Any amino acid
  VARIANT 20: note = Any amino acid
  VARIANT 21: note = Any amino acid
  VARIANT 22: note = Any amino acid
  VARIANT 23: note = Any amino acid
  VARIANT 24: note = Any amino acid
  VARIANT 25: note = Any amino acid
  VARIANT 26: note = Any amino acid
  VARIANT 27: note = Any amino acid
  VARIANT 28: note = Any amino acid
  VARIANT 29: note = Any amino acid
  VARIANT 30: note = Any amino acid
  VARIANT 31: note = Any amino acid
  VARIANT 32: note = Any amino acid
  VARIANT 33: note = Any amino acid
  VARIANT 34: note = Any amino acid
  VARIANT 35: note = Any amino acid
  VARIANT 36: note = Any amino acid
  VARIANT 37: note = Any amino acid
  VARIANT 38: note = Any amino acid
  VARIANT 39: note = Any amino acid
  VARIANT 40: note = Any amino acid
  VARIANT 41: note = Any amino acid
  VARIANT 42: note = Any amino acid
  VARIANT 43: note = Any amino acid
  VARIANT 44: note = Any amino acid
  VARIANT 45: note = Any amino acid
  VARIANT 47: note = Any amino acid
  VARIANT 48: note = Any amino acid
  VARIANT 49: note = Any amino acid
  VARIANT 50: note = Any amino acid
  VARIANT 51: note = Any amino acid
  VARIANT 52: note = Any amino acid
  VARIANT 53: note = Any amino acid
  VARIANT 54: note = Any amino acid
  VARIANT 55: note = Any amino acid
  VARIANT 56: note = Any amino acid
  VARIANT 57: note = Any amino acid
  VARIANT 58: note = Any amino acid
  VARIANT 59: note = Any amino acid
  VARIANT 60: note = Any amino acid
  VARIANT 61: note = Any amino acid
  VARIANT 62: note = Any amino acid
  VARIANT 63: note = Any amino acid
  VARIANT 64: note = Any amino acid
  VARIANT 65: note = Any amino acid
  VARIANT 66: note = Any amino acid
  VARIANT 67: note = Any amino acid
  VARIANT 68: note = Any amino acid
  VARIANT 69: note = Any amino acid
  VARIANT 70: note = Any amino acid
  VARIANT 71: note = Any amino acid
  VARIANT 72: note = Any amino acid
  VARIANT 73: note = Any amino acid
  VARIANT 74: note = Any amino acid
  VARIANT 75: note = Any amino acid
  VARIANT 76: note = Any amino acid
  VARIANT 77: note = Any amino acid
  VARIANT 78: note = Any amino acid
  VARIANT 79: note = Any amino acid
  VARIANT 80: note = Any amino acid
  VARIANT 81: note = Any amino acid
  VARIANT 82: note = Any amino acid
  VARIANT 83: note = Any amino acid
  VARIANT 84: note = Any amino acid
  VARIANT 86: note = Any amino acid
  VARIANT 88: note = Any amino acid
  VARIANT 89: note = Any amino acid
DXXXXXXXXXXXXXXXXXXXXXXXXXXXXXXXXXXXXXXXXXXXXTXXXXXXXXXXXXXXXXXXXXXXXXXXXXXXXXXXXXXXKXDXXD

SEQ ID NO: 796572 - protein, 87 aa, unidentified
  VARIANT 2: note = Any amino acid
  VARIANT 3: note = Any amino acid
  VARIANT 4: note = Any amino acid
  VARIANT 5: note = Any amino acid
  VARIANT 6: note = Any amino acid
  VARIANT 7: note = Any amino acid
  VARIANT 8: note = Any amino acid
  VARIANT 9: note = Any amino acid
  VARIANT 10: note = Any amino acid
  VARIANT 11: note = Any amino acid
  VARIANT 12: note = Any amino acid
  VARIANT 13: note = Any amino acid
  VARIANT 14: note = Any amino acid
  VARIANT 15: note = Any amino acid
  VARIANT 16: note = Any amino acid
  VARIANT 17: note = Any amino acid
  VARIANT 18: note = Any amino acid
  VARIANT 19: note = Any amino acid
  VARIANT 20: note = Any amino acid
  VARIANT 21: note = Any amino acid
  VARIANT 22: note = Any amino acid
  VARIANT 23: note = Any amino acid
  VARIANT 24: note = Any amino acid
  VARIANT 25: note = Any amino acid
  VARIANT 26: note = Any amino acid
  VARIANT 27: note = Any amino acid
  VARIANT 28: note = Any amino acid
  VARIANT 29: note = Any amino acid
  VARIANT 30: note = Any amino acid
  VARIANT 31: note = Any amino acid
  VARIANT 32: note = Any amino acid
  VARIANT 33: note = Any amino acid
  VARIANT 34: note = Any amino acid
  VARIANT 35: note = Any amino acid
  VARIANT 36: note = Any amino acid
  VARIANT 37: note = Any amino acid
  VARIANT 38: note = Any amino acid
  VARIANT 39: note = Any amino acid
  VARIANT 40: note = Any amino acid
  VARIANT 41: note = Any amino acid
  VARIANT 42: note = Any amino acid
  VARIANT 43: note = Any amino acid
  VARIANT 44: note = Any amino acid
  VARIANT 45: note = Any amino acid
  VARIANT 47: note = Any amino acid
  VARIANT 48: note = Any amino acid
  VARIANT 49: note = Any amino acid
  VARIANT 50: note = Any amino acid
  VARIANT 51: note = Any amino acid
  VARIANT 52: note = Any amino acid
  VARIANT 53: note = Any amino acid
  VARIANT 54: note = Any amino acid
  VARIANT 55: note = Any amino acid
  VARIANT 56: note = Any amino acid
  VARIANT 57: note = Any amino acid
  VARIANT 58: note = Any amino acid
  VARIANT 59: note = Any amino acid
  VARIANT 60: note = Any amino acid
  VARIANT 61: note = Any amino acid
  VARIANT 62: note = Any amino acid
  VARIANT 63: note = Any amino acid
  VARIANT 64: note = Any amino acid
  VARIANT 65: note = Any amino acid
  VARIANT 66: note = Any amino acid
  VARIANT 67: note = Any amino acid
  VARIANT 68: note = Any amino acid
  VARIANT 69: note = Any amino acid
  VARIANT 70: note = Any amino acid
  VARIANT 71: note = Any amino acid
  VARIANT 72: note = Any amino acid
  VARIANT 73: note = Any amino acid
  VARIANT 74: note = Any amino acid
  VARIANT 75: note = Any amino acid
  VARIANT 76: note = Any amino acid
  VARIANT 77: note = Any amino acid
  VARIANT 78: note = Any amino acid
  VARIANT 79: note = Any amino acid
  VARIANT 80: note = Any amino acid
  VARIANT 81: note = Any amino acid
  VARIANT 83: note = Any amino acid
  VARIANT 85: note = Any amino acid
  VARIANT 86: note = Any amino acid
DXXXXXXXXXXXXXXXXXXXXXXXXXXXXXXXXXXXXXXXXXXXXEXXXXXXXXXXXXXXXXXXXXXXXXXXXXXXXXXXXKXDXXS

SEQ ID NO: 796573 - protein, 84 aa, unidentified
  VARIANT 2: note = Any amino acid
  VARIANT 3: note = Any amino acid
  VARIANT 4: note = Any amino acid
  VARIANT 5: note = Any amino acid
  VARIANT 6: note = Any amino acid
  VARIANT 7: note = Any amino acid
  VARIANT 8: note = Any amino acid
  VARIANT 9: note = Any amino acid
  VARIANT 10: note = Any amino acid
  VARIANT 11: note = Any amino acid
  VARIANT 12: note = Any amino acid
  VARIANT 13: note = Any amino acid
  VARIANT 14: note = Any amino acid
  VARIANT 15: note = Any amino acid
  VARIANT 16: note = Any amino acid
  VARIANT 17: note = Any amino acid
  VARIANT 18: note = Any amino acid
  VARIANT 19: note = Any amino acid
  VARIANT 20: note = Any amino acid
  VARIANT 21: note = Any amino acid
  VARIANT 22: note = Any amino acid
  VARIANT 23: note = Any amino acid
  VARIANT 24: note = Any amino acid
  VARIANT 25: note = Any amino acid
  VARIANT 26: note = Any amino acid
  VARIANT 27: note = Any amino acid
  VARIANT 28: note = Any amino acid
  VARIANT 29: note = Any amino acid
  VARIANT 30: note = Any amino acid
  VARIANT 31: note = Any amino acid
  VARIANT 32: note = Any amino acid
  VARIANT 33: note = Any amino acid
  VARIANT 34: note = Any amino acid
  VARIANT 35: note = Any amino acid
  VARIANT 36: note = Any amino acid
  VARIANT 37: note = Any amino acid
  VARIANT 38: note = Any amino acid
  VARIANT 39: note = Any amino acid
  VARIANT 40: note = Any amino acid
  VARIANT 41: note = Any amino acid
  VARIANT 42: note = Any amino acid
  VARIANT 43: note = Any amino acid
  VARIANT 45: note = Any amino acid
  VARIANT 46: note = Any amino acid
  VARIANT 47: note = Any amino acid
  VARIANT 48: note = Any amino acid
  VARIANT 49: note = Any amino acid
  VARIANT 50: note = Any amino acid
  VARIANT 51: note = Any amino acid
  VARIANT 52: note = Any amino acid
  VARIANT 53: note = Any amino acid
  VARIANT 54: note = Any amino acid
  VARIANT 55: note = Any amino acid
  VARIANT 56: note = Any amino acid
  VARIANT 57: note = Any amino acid
  VARIANT 58: note = Any amino acid
  VARIANT 59: note = Any amino acid
  VARIANT 60: note = Any amino acid
  VARIANT 61: note = Any amino acid
  VARIANT 62: note = Any amino acid
  VARIANT 63: note = Any amino acid
  VARIANT 64: note = Any amino acid
  VARIANT 65: note = Any amino acid
  VARIANT 66: note = Any amino acid
  VARIANT 67: note = Any amino acid
  VARIANT 68: note = Any amino acid
  VARIANT 69: note = Any amino acid
  VARIANT 70: note = Any amino acid
  VARIANT 71: note = Any amino acid
  VARIANT 72: note = Any amino acid
  VARIANT 73: note = Any amino acid
  VARIANT 74: note = Any amino acid
  VARIANT 75: note = Any amino acid
  VARIANT 76: note = Any amino acid
  VARIANT 77: note = Any amino acid
  VARIANT 78: note = Any amino acid
  VARIANT 80: note = Any amino acid
  VARIANT 82: note = Any amino acid
  VARIANT 83: note = Any amino acid
DXXXXXXXXXXXXXXXXXXXXXXXXXXXXXXXXXXXXXXXXXXEXXXXXXXXXXXXXXXXXXXXXXXXXXXXXXXXXXKXNXXD

SEQ ID NO: 796574 - protein, 88 aa, unidentified
  VARIANT 2: note = Any amino acid
  VARIANT 3: note = Any amino acid
  VARIANT 4: note = Any amino acid
  VARIANT 5: note = Any amino acid
  VARIANT 6: note = Any amino acid
  VARIANT 7: note = Any amino acid
  VARIANT 8: note = Any amino acid
  VARIANT 9: note = Any amino acid
  VARIANT 10: note = Any amino acid
  VARIANT 11: note = Any amino acid
  VARIANT 12: note = Any amino acid
  VARIANT 13: note = Any amino acid
  VARIANT 14: note = Any amino acid
  VARIANT 15: note = Any amino acid
  VARIANT 16: note = Any amino acid
  VARIANT 17: note = Any amino acid
  VARIANT 18: note = Any amino acid
  VARIANT 19: note = Any amino acid
  VARIANT 20: note = Any amino acid
  VARIANT 21: note = Any amino acid
  VARIANT 22: note = Any amino acid
  VARIANT 23: note = Any amino acid
  VARIANT 24: note = Any amino acid
  VARIANT 25: note = Any amino acid
  VARIANT 26: note = Any amino acid
  VARIANT 27: note = Any amino acid
  VARIANT 28: note = Any amino acid
  VARIANT 29: note = Any amino acid
  VARIANT 30: note = Any amino acid
  VARIANT 31: note = Any amino acid
  VARIANT 32: note = Any amino acid
  VARIANT 33: note = Any amino acid
  VARIANT 34: note = Any amino acid
  VARIANT 35: note = Any amino acid
  VARIANT 36: note = Any amino acid
  VARIANT 37: note = Any amino acid
  VARIANT 38: note = Any amino acid
  VARIANT 39: note = Any amino acid
  VARIANT 40: note = Any amino acid
  VARIANT 41: note = Any amino acid
  VARIANT 42: note = Any amino acid
  VARIANT 43: note = Any amino acid
  VARIANT 44: note = Any amino acid
  VARIANT 45: note = Any amino acid
  VARIANT 47: note = Any amino acid
  VARIANT 48: note = Any amino acid
  VARIANT 49: note = Any amino acid
  VARIANT 50: note = Any amino acid
  VARIANT 51: note = Any amino acid
  VARIANT 52: note = Any amino acid
  VARIANT 53: note = Any amino acid
  VARIANT 54: note = Any amino acid
  VARIANT 55: note = Any amino acid
  VARIANT 56: note = Any amino acid
  VARIANT 57: note = Any amino acid
  VARIANT 58: note = Any amino acid
  VARIANT 59: note = Any amino acid
  VARIANT 60: note = Any amino acid
  VARIANT 61: note = Any amino acid
  VARIANT 62: note = Any amino acid
  VARIANT 63: note = Any amino acid
  VARIANT 64: note = Any amino acid
  VARIANT 65: note = Any amino acid
  VARIANT 66: note = Any amino acid
  VARIANT 67: note = Any amino acid
  VARIANT 68: note = Any amino acid
  VARIANT 69: note = Any amino acid
  VARIANT 70: note = Any amino acid
  VARIANT 71: note = Any amino acid
  VARIANT 72: note = Any amino acid
  VARIANT 73: note = Any amino acid
  VARIANT 74: note = Any amino acid
  VARIANT 75: note = Any amino acid
  VARIANT 76: note = Any amino acid
  VARIANT 77: note = Any amino acid
  VARIANT 78: note = Any amino acid
  VARIANT 79: note = Any amino acid
  VARIANT 80: note = Any amino acid
  VARIANT 81: note = Any amino acid
  VARIANT 82: note = Any amino acid
  VARIANT 84: note = Any amino acid
  VARIANT 86: note = Any amino acid
  VARIANT 87: note = Any amino acid
DXXXXXXXXXXXXXXXXXXXXXXXXXXXXXXXXXXXXXXXXXXXXMXXXXXXXXXXXXXXXXXXXXXXXXXXXXXXXXXXXXKXDXXD

SEQ ID NO: 796575 - protein, 90 aa, unidentified
  VARIANT 2: note = Any amino acid
  VARIANT 3: note = Any amino acid
  VARIANT 4: note = Any amino acid
  VARIANT 5: note = Any amino acid
  VARIANT 6: note = Any amino acid
  VARIANT 7: note = Any amino acid
  VARIANT 8: note = Any amino acid
  VARIANT 9: note = Any amino acid
  VARIANT 10: note = Any amino acid
  VARIANT 11: note = Any amino acid
  VARIANT 12: note = Any amino acid
  VARIANT 13: note = Any amino acid
  VARIANT 14: note = Any amino acid
  VARIANT 15: note = Any amino acid
  VARIANT 16: note = Any amino acid
  VARIANT 17: note = Any amino acid
  VARIANT 18: note = Any amino acid
  VARIANT 19: note = Any amino acid
  VARIANT 20: note = Any amino acid
  VARIANT 21: note = Any amino acid
  VARIANT 22: note = Any amino acid
  VARIANT 23: note = Any amino acid
  VARIANT 24: note = Any amino acid
  VARIANT 25: note = Any amino acid
  VARIANT 26: note = Any amino acid
  VARIANT 27: note = Any amino acid
  VARIANT 28: note = Any amino acid
  VARIANT 29: note = Any amino acid
  VARIANT 30: note = Any amino acid
  VARIANT 31: note = Any amino acid
  VARIANT 32: note = Any amino acid
  VARIANT 33: note = Any amino acid
  VARIANT 34: note = Any amino acid
  VARIANT 35: note = Any amino acid
  VARIANT 36: note = Any amino acid
  VARIANT 37: note = Any amino acid
  VARIANT 38: note = Any amino acid
  VARIANT 39: note = Any amino acid
  VARIANT 40: note = Any amino acid
  VARIANT 41: note = Any amino acid
  VARIANT 42: note = Any amino acid
  VARIANT 43: note = Any amino acid
  VARIANT 44: note = Any amino acid
  VARIANT 45: note = Any amino acid
  VARIANT 46: note = Any amino acid
  VARIANT 47: note = Any amino acid
  VARIANT 48: note = Any amino acid
  VARIANT 50: note = Any amino acid
  VARIANT 51: note = Any amino acid
  VARIANT 52: note = Any amino acid
  VARIANT 53: note = Any amino acid
  VARIANT 54: note = Any amino acid
  VARIANT 55: note = Any amino acid
  VARIANT 56: note = Any amino acid
  VARIANT 57: note = Any amino acid
  VARIANT 58: note = Any amino acid
  VARIANT 59: note = Any amino acid
  VARIANT 60: note = Any amino acid
  VARIANT 61: note = Any amino acid
  VARIANT 62: note = Any amino acid
  VARIANT 63: note = Any amino acid
  VARIANT 64: note = Any amino acid
  VARIANT 65: note = Any amino acid
  VARIANT 66: note = Any amino acid
  VARIANT 67: note = Any amino acid
  VARIANT 68: note = Any amino acid
  VARIANT 69: note = Any amino acid
  VARIANT 70: note = Any amino acid
  VARIANT 71: note = Any amino acid
  VARIANT 72: note = Any amino acid
  VARIANT 73: note = Any amino acid
  VARIANT 74: note = Any amino acid
  VARIANT 75: note = Any amino acid
  VARIANT 76: note = Any amino acid
  VARIANT 77: note = Any amino acid
  VARIANT 78: note = Any amino acid
  VARIANT 79: note = Any amino acid
  VARIANT 80: note = Any amino acid
  VARIANT 81: note = Any amino acid
  VARIANT 82: note = Any amino acid
  VARIANT 83: note = Any amino acid
  VARIANT 84: note = Any amino acid
  VARIANT 86: note = Any amino acid
  VARIANT 88: note = Any amino acid
  VARIANT 89: note = Any amino acid
DXXXXXXXXXXXXXXXXXXXXXXXXXXXXXXXXXXXXXXXXXXXXXXXEXXXXXXXXXXXXXXXXXXXXXXXXXXXXXXXXXXXKXNXXD

SEQ ID NO: 796576 - protein, 94 aa, unidentified
  VARIANT 2: note = Any amino acid
  VARIANT 3: note = Any amino acid
  VARIANT 4: note = Any amino acid
  VARIANT 5: note = Any amino acid
  VARIANT 6: note = Any amino acid
  VARIANT 7: note = Any amino acid
  VARIANT 8: note = Any amino acid
  VARIANT 9: note = Any amino acid
  VARIANT 10: note = Any amino acid
  VARIANT 11: note = Any amino acid
  VARIANT 12: note = Any amino acid
  VARIANT 13: note = Any amino acid
  VARIANT 14: note = Any amino acid
  VARIANT 15: note = Any amino acid
  VARIANT 16: note = Any amino acid
  VARIANT 17: note = Any amino acid
  VARIANT 18: note = Any amino acid
  VARIANT 19: note = Any amino acid
  VARIANT 20: note = Any amino acid
  VARIANT 21: note = Any amino acid
  VARIANT 22: note = Any amino acid
  VARIANT 23: note = Any amino acid
  VARIANT 24: note = Any amino acid
  VARIANT 25: note = Any amino acid
  VARIANT 26: note = Any amino acid
  VARIANT 27: note = Any amino acid
  VARIANT 28: note = Any amino acid
  VARIANT 29: note = Any amino acid
  VARIANT 30: note = Any amino acid
  VARIANT 31: note = Any amino acid
  VARIANT 32: note = Any amino acid
  VARIANT 33: note = Any amino acid
  VARIANT 34: note = Any amino acid
  VARIANT 35: note = Any amino acid
  VARIANT 36: note = Any amino acid
  VARIANT 37: note = Any amino acid
  VARIANT 38: note = Any amino acid
  VARIANT 39: note = Any amino acid
  VARIANT 40: note = Any amino acid
  VARIANT 41: note = Any amino acid
  VARIANT 42: note = Any amino acid
  VARIANT 43: note = Any amino acid
  VARIANT 44: note = Any amino acid
  VARIANT 45: note = Any amino acid
  VARIANT 46: note = Any amino acid
  VARIANT 47: note = Any amino acid
  VARIANT 48: note = Any amino acid
  VARIANT 49: note = Any amino acid
  VARIANT 50: note = Any amino acid
  VARIANT 52: note = Any amino acid
  VARIANT 53: note = Any amino acid
  VARIANT 54: note = Any amino acid
  VARIANT 55: note = Any amino acid
  VARIANT 56: note = Any amino acid
  VARIANT 57: note = Any amino acid
  VARIANT 58: note = Any amino acid
  VARIANT 59: note = Any amino acid
  VARIANT 60: note = Any amino acid
  VARIANT 61: note = Any amino acid
  VARIANT 62: note = Any amino acid
  VARIANT 63: note = Any amino acid
  VARIANT 64: note = Any amino acid
  VARIANT 65: note = Any amino acid
  VARIANT 66: note = Any amino acid
  VARIANT 67: note = Any amino acid
  VARIANT 68: note = Any amino acid
  VARIANT 69: note = Any amino acid
  VARIANT 70: note = Any amino acid
  VARIANT 71: note = Any amino acid
  VARIANT 72: note = Any amino acid
  VARIANT 73: note = Any amino acid
  VARIANT 74: note = Any amino acid
  VARIANT 75: note = Any amino acid
  VARIANT 76: note = Any amino acid
  VARIANT 77: note = Any amino acid
  VARIANT 78: note = Any amino acid
  VARIANT 79: note = Any amino acid
  VARIANT 80: note = Any amino acid
  VARIANT 81: note = Any amino acid
  VARIANT 82: note = Any amino acid
  VARIANT 83: note = Any amino acid
  VARIANT 84: note = Any amino acid
  VARIANT 85: note = Any amino acid
  VARIANT 86: note = Any amino acid
  VARIANT 87: note = Any amino acid
  VARIANT 88: note = Any amino acid
  VARIANT 90: note = Any amino acid
  VARIANT 92: note = Any amino acid
  VARIANT 93: note = Any amino acid
DXXXXXXXXXXXXXXXXXXXXXXXXXXXXXXXXXXXXXXXXXXXXXXXXXGXXXXXXXXXXXXXXXXXXXXXXXXXXXXXXXXXXXXXKXDXXD

SEQ ID NO: 796577 - protein, 89 aa, unidentified
  VARIANT 2: note = Any amino acid
  VARIANT 3: note = Any amino acid
  VARIANT 4: note = Any amino acid
  VARIANT 5: note = Any amino acid
  VARIANT 6: note = Any amino acid
  VARIANT 7: note = Any amino acid
  VARIANT 8: note = Any amino acid
  VARIANT 9: note = Any amino acid
  VARIANT 10: note = Any amino acid
  VARIANT 11: note = Any amino acid
  VARIANT 12: note = Any amino acid
  VARIANT 13: note = Any amino acid
  VARIANT 14: note = Any amino acid
  VARIANT 15: note = Any amino acid
  VARIANT 16: note = Any amino acid
  VARIANT 17: note = Any amino acid
  VARIANT 18: note = Any amino acid
  VARIANT 19: note = Any amino acid
  VARIANT 20: note = Any amino acid
  VARIANT 21: note = Any amino acid
  VARIANT 22: note = Any amino acid
  VARIANT 23: note = Any amino acid
  VARIANT 24: note = Any amino acid
  VARIANT 25: note = Any amino acid
  VARIANT 26: note = Any amino acid
  VARIANT 27: note = Any amino acid
  VARIANT 28: note = Any amino acid
  VARIANT 29: note = Any amino acid
  VARIANT 30: note = Any amino acid
  VARIANT 31: note = Any amino acid
  VARIANT 32: note = Any amino acid
  VARIANT 33: note = Any amino acid
  VARIANT 34: note = Any amino acid
  VARIANT 35: note = Any amino acid
  VARIANT 36: note = Any amino acid
  VARIANT 37: note = Any amino acid
  VARIANT 38: note = Any amino acid
  VARIANT 39: note = Any amino acid
  VARIANT 40: note = Any amino acid
  VARIANT 41: note = Any amino acid
  VARIANT 42: note = Any amino acid
  VARIANT 43: note = Any amino acid
  VARIANT 44: note = Any amino acid
  VARIANT 45: note = Any amino acid
  VARIANT 46: note = Any amino acid
  VARIANT 47: note = Any amino acid
  VARIANT 48: note = Any amino acid
  VARIANT 49: note = Any amino acid
  VARIANT 50: note = Any amino acid
  VARIANT 51: note = Any amino acid
  VARIANT 53: note = Any amino acid
  VARIANT 54: note = Any amino acid
  VARIANT 55: note = Any amino acid
  VARIANT 56: note = Any amino acid
  VARIANT 57: note = Any amino acid
  VARIANT 58: note = Any amino acid
  VARIANT 59: note = Any amino acid
  VARIANT 60: note = Any amino acid
  VARIANT 61: note = Any amino acid
  VARIANT 62: note = Any amino acid
  VARIANT 63: note = Any amino acid
  VARIANT 64: note = Any amino acid
  VARIANT 65: note = Any amino acid
  VARIANT 66: note = Any amino acid
  VARIANT 67: note = Any amino acid
  VARIANT 68: note = Any amino acid
  VARIANT 69: note = Any amino acid
  VARIANT 70: note = Any amino acid
  VARIANT 71: note = Any amino acid
  VARIANT 72: note = Any amino acid
  VARIANT 73: note = Any amino acid
  VARIANT 74: note = Any amino acid
  VARIANT 75: note = Any amino acid
  VARIANT 76: note = Any amino acid
  VARIANT 77: note = Any amino acid
  VARIANT 78: note = Any amino acid
  VARIANT 79: note = Any amino acid
  VARIANT 80: note = Any amino acid
  VARIANT 81: note = Any amino acid
  VARIANT 82: note = Any amino acid
  VARIANT 83: note = Any amino acid
  VARIANT 85: note = Any amino acid
  VARIANT 87: note = Any amino acid
  VARIANT 88: note = Any amino acid
DXXXXXXXXXXXXXXXXXXXXXXXXXXXXXXXXXXXXXXXXXXXXXXXXXXEXXXXXXXXXXXXXXXXXXXXXXXXXXXXXXXKXDXXD

SEQ ID NO: 796578 - protein, 93 aa, unidentified
  VARIANT 2: note = Any amino acid
  VARIANT 3: note = Any amino acid
  VARIANT 4: note = Any amino acid
  VARIANT 5: note = Any amino acid
  VARIANT 6: note = Any amino acid
  VARIANT 7: note = Any amino acid
  VARIANT 8: note = Any amino acid
  VARIANT 9: note = Any amino acid
  VARIANT 10: note = Any amino acid
  VARIANT 11: note = Any amino acid
  VARIANT 12: note = Any amino acid
  VARIANT 13: note = Any amino acid
  VARIANT 14: note = Any amino acid
  VARIANT 15: note = Any amino acid
  VARIANT 16: note = Any amino acid
  VARIANT 17: note = Any amino acid
  VARIANT 18: note = Any amino acid
  VARIANT 19: note = Any amino acid
  VARIANT 20: note = Any amino acid
  VARIANT 21: note = Any amino acid
  VARIANT 22: note = Any amino acid
  VARIANT 23: note = Any amino acid
  VARIANT 24: note = Any amino acid
  VARIANT 25: note = Any amino acid
  VARIANT 26: note = Any amino acid
  VARIANT 27: note = Any amino acid
  VARIANT 28: note = Any amino acid
  VARIANT 29: note = Any amino acid
  VARIANT 30: note = Any amino acid
  VARIANT 31: note = Any amino acid
  VARIANT 32: note = Any amino acid
  VARIANT 33: note = Any amino acid
  VARIANT 34: note = Any amino acid
  VARIANT 35: note = Any amino acid
  VARIANT 36: note = Any amino acid
  VARIANT 37: note = Any amino acid
  VARIANT 38: note = Any amino acid
  VARIANT 39: note = Any amino acid
  VARIANT 40: note = Any amino acid
  VARIANT 41: note = Any amino acid
  VARIANT 42: note = Any amino acid
  VARIANT 43: note = Any amino acid
  VARIANT 44: note = Any amino acid
  VARIANT 45: note = Any amino acid
  VARIANT 46: note = Any amino acid
  VARIANT 47: note = Any amino acid
  VARIANT 48: note = Any amino acid
  VARIANT 49: note = Any amino acid
  VARIANT 51: note = Any amino acid
  VARIANT 52: note = Any amino acid
  VARIANT 53: note = Any amino acid
  VARIANT 54: note = Any amino acid
  VARIANT 55: note = Any amino acid
  VARIANT 56: note = Any amino acid
  VARIANT 57: note = Any amino acid
  VARIANT 58: note = Any amino acid
  VARIANT 59: note = Any amino acid
  VARIANT 60: note = Any amino acid
  VARIANT 61: note = Any amino acid
  VARIANT 62: note = Any amino acid
  VARIANT 63: note = Any amino acid
  VARIANT 64: note = Any amino acid
  VARIANT 65: note = Any amino acid
  VARIANT 66: note = Any amino acid
  VARIANT 67: note = Any amino acid
  VARIANT 68: note = Any amino acid
  VARIANT 69: note = Any amino acid
  VARIANT 70: note = Any amino acid
  VARIANT 71: note = Any amino acid
  VARIANT 72: note = Any amino acid
  VARIANT 73: note = Any amino acid
  VARIANT 74: note = Any amino acid
  VARIANT 75: note = Any amino acid
  VARIANT 76: note = Any amino acid
  VARIANT 77: note = Any amino acid
  VARIANT 78: note = Any amino acid
  VARIANT 79: note = Any amino acid
  VARIANT 80: note = Any amino acid
  VARIANT 81: note = Any amino acid
  VARIANT 82: note = Any amino acid
  VARIANT 83: note = Any amino acid
  VARIANT 84: note = Any amino acid
  VARIANT 85: note = Any amino acid
  VARIANT 86: note = Any amino acid
  VARIANT 87: note = Any amino acid
  VARIANT 89: note = Any amino acid
  VARIANT 91: note = Any amino acid
  VARIANT 92: note = Any amino acid
DXXXXXXXXXXXXXXXXXXXXXXXXXXXXXXXXXXXXXXXXXXXXXXXXAXXXXXXXXXXXXXXXXXXXXXXXXXXXXXXXXXXXXXKXDXXD

SEQ ID NO: 796579 - protein, 102 aa, unidentified
  VARIANT 2: note = Any amino acid
  VARIANT 3: note = Any amino acid
  VARIANT 4: note = Any amino acid
  VARIANT 5: note = Any amino acid
  VARIANT 6: note = Any amino acid
  VARIANT 7: note = Any amino acid
  VARIANT 8: note = Any amino acid
  VARIANT 9: note = Any amino acid
  VARIANT 10: note = Any amino acid
  VARIANT 11: note = Any amino acid
  VARIANT 12: note = Any amino acid
  VARIANT 13: note = Any amino acid
  VARIANT 14: note = Any amino acid
  VARIANT 15: note = Any amino acid
  VARIANT 16: note = Any amino acid
  VARIANT 17: note = Any amino acid
  VARIANT 18: note = Any amino acid
  VARIANT 19: note = Any amino acid
  VARIANT 20: note = Any amino acid
  VARIANT 21: note = Any amino acid
  VARIANT 22: note = Any amino acid
  VARIANT 23: note = Any amino acid
  VARIANT 24: note = Any amino acid
  VARIANT 25: note = Any amino acid
  VARIANT 26: note = Any amino acid
  VARIANT 27: note = Any amino acid
  VARIANT 28: note = Any amino acid
  VARIANT 29: note = Any amino acid
  VARIANT 30: note = Any amino acid
  VARIANT 31: note = Any amino acid
  VARIANT 32: note = Any amino acid
  VARIANT 33: note = Any amino acid
  VARIANT 34: note = Any amino acid
  VARIANT 35: note = Any amino acid
  VARIANT 36: note = Any amino acid
  VARIANT 37: note = Any amino acid
  VARIANT 38: note = Any amino acid
  VARIANT 39: note = Any amino acid
  VARIANT 40: note = Any amino acid
  VARIANT 41: note = Any amino acid
  VARIANT 42: note = Any amino acid
  VARIANT 43: note = Any amino acid
  VARIANT 44: note = Any amino acid
  VARIANT 45: note = Any amino acid
  VARIANT 46: note = Any amino acid
  VARIANT 47: note = Any amino acid
  VARIANT 48: note = Any amino acid
  VARIANT 49: note = Any amino acid
  VARIANT 50: note = Any amino acid
  VARIANT 51: note = Any amino acid
  VARIANT 52: note = Any amino acid
  VARIANT 53: note = Any amino acid
  VARIANT 54: note = Any amino acid
  VARIANT 55: note = Any amino acid
  VARIANT 56: note = Any amino acid
  VARIANT 57: note = Any amino acid
  VARIANT 58: note = Any amino acid
  VARIANT 59: note = Any amino acid
  VARIANT 60: note = Any amino acid
  VARIANT 62: note = Any amino acid
  VARIANT 63: note = Any amino acid
  VARIANT 64: note = Any amino acid
  VARIANT 65: note = Any amino acid
  VARIANT 66: note = Any amino acid
  VARIANT 67: note = Any amino acid
  VARIANT 68: note = Any amino acid
  VARIANT 69: note = Any amino acid
  VARIANT 70: note = Any amino acid
  VARIANT 71: note = Any amino acid
  VARIANT 72: note = Any amino acid
  VARIANT 73: note = Any amino acid
  VARIANT 74: note = Any amino acid
  VARIANT 75: note = Any amino acid
  VARIANT 76: note = Any amino acid
  VARIANT 77: note = Any amino acid
  VARIANT 78: note = Any amino acid
  VARIANT 79: note = Any amino acid
  VARIANT 80: note = Any amino acid
  VARIANT 81: note = Any amino acid
  VARIANT 82: note = Any amino acid
  VARIANT 83: note = Any amino acid
  VARIANT 84: note = Any amino acid
  VARIANT 85: note = Any amino acid
  VARIANT 86: note = Any amino acid
  VARIANT 87: note = Any amino acid
  VARIANT 88: note = Any amino acid
  VARIANT 89: note = Any amino acid
  VARIANT 90: note = Any amino acid
  VARIANT 91: note = Any amino acid
  VARIANT 92: note = Any amino acid
  VARIANT 93: note = Any amino acid
  VARIANT 94: note = Any amino acid
  VARIANT 95: note = Any amino acid
  VARIANT 96: note = Any amino acid
  VARIANT 98: note = Any amino acid
  VARIANT 100: note = Any amino acid
  VARIANT 101: note = Any amino acid
DXXXXXXXXXXXXXXXXXXXXXXXXXXXXXXXXXXXXXXXXXXXXXXXXXXXXXXXXXXXEXXXXXXXXXXXXXXXXXXXXXXXXXXXXXXXXXXXKXDXXD

SEQ ID NO: 796580 - protein, 89 aa, unidentified
  VARIANT 2: note = Any amino acid
  VARIANT 3: note = Any amino acid
  VARIANT 4: note = Any amino acid
  VARIANT 5: note = Any amino acid
  VARIANT 6: note = Any amino acid
  VARIANT 7: note = Any amino acid
  VARIANT 8: note = Any amino acid
  VARIANT 9: note = Any amino acid
  VARIANT 10: note = Any amino acid
  VARIANT 11: note = Any amino acid
  VARIANT 12: note = Any amino acid
  VARIANT 13: note = Any amino acid
  VARIANT 14: note = Any amino acid
  VARIANT 15: note = Any amino acid
  VARIANT 16: note = Any amino acid
  VARIANT 17: note = Any amino acid
  VARIANT 18: note = Any amino acid
  VARIANT 19: note = Any amino acid
  VARIANT 20: note = Any amino acid
  VARIANT 21: note = Any amino acid
  VARIANT 22: note = Any amino acid
  VARIANT 23: note = Any amino acid
  VARIANT 24: note = Any amino acid
  VARIANT 25: note = Any amino acid
  VARIANT 26: note = Any amino acid
  VARIANT 27: note = Any amino acid
  VARIANT 28: note = Any amino acid
  VARIANT 29: note = Any amino acid
  VARIANT 30: note = Any amino acid
  VARIANT 31: note = Any amino acid
  VARIANT 32: note = Any amino acid
  VARIANT 33: note = Any amino acid
  VARIANT 34: note = Any amino acid
  VARIANT 35: note = Any amino acid
  VARIANT 36: note = Any amino acid
  VARIANT 37: note = Any amino acid
  VARIANT 38: note = Any amino acid
  VARIANT 39: note = Any amino acid
  VARIANT 40: note = Any amino acid
  VARIANT 41: note = Any amino acid
  VARIANT 42: note = Any amino acid
  VARIANT 43: note = Any amino acid
  VARIANT 44: note = Any amino acid
  VARIANT 45: note = Any amino acid
  VARIANT 46: note = Any amino acid
  VARIANT 47: note = Any amino acid
  VARIANT 49: note = Any amino acid
  VARIANT 50: note = Any amino acid
  VARIANT 51: note = Any amino acid
  VARIANT 52: note = Any amino acid
  VARIANT 53: note = Any amino acid
  VARIANT 54: note = Any amino acid
  VARIANT 55: note = Any amino acid
  VARIANT 56: note = Any amino acid
  VARIANT 57: note = Any amino acid
  VARIANT 58: note = Any amino acid
  VARIANT 59: note = Any amino acid
  VARIANT 60: note = Any amino acid
  VARIANT 61: note = Any amino acid
  VARIANT 62: note = Any amino acid
  VARIANT 63: note = Any amino acid
  VARIANT 64: note = Any amino acid
  VARIANT 65: note = Any amino acid
  VARIANT 66: note = Any amino acid
  VARIANT 67: note = Any amino acid
  VARIANT 68: note = Any amino acid
  VARIANT 69: note = Any amino acid
  VARIANT 70: note = Any amino acid
  VARIANT 71: note = Any amino acid
  VARIANT 72: note = Any amino acid
  VARIANT 73: note = Any amino acid
  VARIANT 74: note = Any amino acid
  VARIANT 75: note = Any amino acid
  VARIANT 76: note = Any amino acid
  VARIANT 77: note = Any amino acid
  VARIANT 78: note = Any amino acid
  VARIANT 79: note = Any amino acid
  VARIANT 80: note = Any amino acid
  VARIANT 81: note = Any amino acid
  VARIANT 82: note = Any amino acid
  VARIANT 83: note = Any amino acid
  VARIANT 85: note = Any amino acid
  VARIANT 87: note = Any amino acid
  VARIANT 88: note = Any amino acid
DXXXXXXXXXXXXXXXXXXXXXXXXXXXXXXXXXXXXXXXXXXXXXXYXXXXXXXXXXXXXXXXXXXXXXXXXXXXXXXXXXXKXDXXD

SEQ ID NO: 796581 - protein, 96 aa, unidentified
  VARIANT 2: note = Any amino acid
  VARIANT 3: note = Any amino acid
  VARIANT 4: note = Any amino acid
  VARIANT 5: note = Any amino acid
  VARIANT 6: note = Any amino acid
  VARIANT 7: note = Any amino acid
  VARIANT 8: note = Any amino acid
  VARIANT 9: note = Any amino acid
  VARIANT 10: note = Any amino acid
  VARIANT 11: note = Any amino acid
  VARIANT 12: note = Any amino acid
  VARIANT 13: note = Any amino acid
  VARIANT 14: note = Any amino acid
  VARIANT 15: note = Any amino acid
  VARIANT 16: note = Any amino acid
  VARIANT 17: note = Any amino acid
  VARIANT 18: note = Any amino acid
  VARIANT 19: note = Any amino acid
  VARIANT 20: note = Any amino acid
  VARIANT 21: note = Any amino acid
  VARIANT 22: note = Any amino acid
  VARIANT 23: note = Any amino acid
  VARIANT 24: note = Any amino acid
  VARIANT 25: note = Any amino acid
  VARIANT 26: note = Any amino acid
  VARIANT 27: note = Any amino acid
  VARIANT 28: note = Any amino acid
  VARIANT 29: note = Any amino acid
  VARIANT 30: note = Any amino acid
  VARIANT 31: note = Any amino acid
  VARIANT 32: note = Any amino acid
  VARIANT 33: note = Any amino acid
  VARIANT 34: note = Any amino acid
  VARIANT 35: note = Any amino acid
  VARIANT 36: note = Any amino acid
  VARIANT 37: note = Any amino acid
  VARIANT 38: note = Any amino acid
  VARIANT 39: note = Any amino acid
  VARIANT 40: note = Any amino acid
  VARIANT 41: note = Any amino acid
  VARIANT 42: note = Any amino acid
  VARIANT 43: note = Any amino acid
  VARIANT 44: note = Any amino acid
  VARIANT 45: note = Any amino acid
  VARIANT 46: note = Any amino acid
  VARIANT 47: note = Any amino acid
  VARIANT 48: note = Any amino acid
  VARIANT 49: note = Any amino acid
  VARIANT 50: note = Any amino acid
  VARIANT 51: note = Any amino acid
  VARIANT 52: note = Any amino acid
  VARIANT 54: note = Any amino acid
  VARIANT 55: note = Any amino acid
  VARIANT 56: note = Any amino acid
  VARIANT 57: note = Any amino acid
  VARIANT 58: note = Any amino acid
  VARIANT 59: note = Any amino acid
  VARIANT 60: note = Any amino acid
  VARIANT 61: note = Any amino acid
  VARIANT 62: note = Any amino acid
  VARIANT 63: note = Any amino acid
  VARIANT 64: note = Any amino acid
  VARIANT 65: note = Any amino acid
  VARIANT 66: note = Any amino acid
  VARIANT 67: note = Any amino acid
  VARIANT 68: note = Any amino acid
  VARIANT 69: note = Any amino acid
  VARIANT 70: note = Any amino acid
  VARIANT 71: note = Any amino acid
  VARIANT 72: note = Any amino acid
  VARIANT 73: note = Any amino acid
  VARIANT 74: note = Any amino acid
  VARIANT 75: note = Any amino acid
  VARIANT 76: note = Any amino acid
  VARIANT 77: note = Any amino acid
  VARIANT 78: note = Any amino acid
  VARIANT 79: note = Any amino acid
  VARIANT 80: note = Any amino acid
  VARIANT 81: note = Any amino acid
  VARIANT 82: note = Any amino acid
  VARIANT 83: note = Any amino acid
  VARIANT 84: note = Any amino acid
  VARIANT 85: note = Any amino acid
  VARIANT 86: note = Any amino acid
  VARIANT 87: note = Any amino acid
  VARIANT 88: note = Any amino acid
  VARIANT 89: note = Any amino acid
  VARIANT 90: note = Any amino acid
  VARIANT 92: note = Any amino acid
  VARIANT 94: note = Any amino acid
  VARIANT 95: note = Any amino acid
DXXXXXXXXXXXXXXXXXXXXXXXXXXXXXXXXXXXXXXXXXXXXXXXXXXXYXXXXXXXXXXXXXXXXXXXXXXXXXXXXXXXXXXXXXKXDXXD

SEQ ID NO: 796582 - protein, 94 aa, unidentified
  VARIANT 2: note = Any amino acid
  VARIANT 3: note = Any amino acid
  VARIANT 4: note = Any amino acid
  VARIANT 5: note = Any amino acid
  VARIANT 6: note = Any amino acid
  VARIANT 7: note = Any amino acid
  VARIANT 8: note = Any amino acid
  VARIANT 9: note = Any amino acid
  VARIANT 10: note = Any amino acid
  VARIANT 11: note = Any amino acid
  VARIANT 12: note = Any amino acid
  VARIANT 13: note = Any amino acid
  VARIANT 14: note = Any amino acid
  VARIANT 15: note = Any amino acid
  VARIANT 16: note = Any amino acid
  VARIANT 17: note = Any amino acid
  VARIANT 18: note = Any amino acid
  VARIANT 19: note = Any amino acid
  VARIANT 20: note = Any amino acid
  VARIANT 21: note = Any amino acid
  VARIANT 22: note = Any amino acid
  VARIANT 23: note = Any amino acid
  VARIANT 24: note = Any amino acid
  VARIANT 25: note = Any amino acid
  VARIANT 26: note = Any amino acid
  VARIANT 27: note = Any amino acid
  VARIANT 28: note = Any amino acid
  VARIANT 29: note = Any amino acid
  VARIANT 30: note = Any amino acid
  VARIANT 31: note = Any amino acid
  VARIANT 32: note = Any amino acid
  VARIANT 33: note = Any amino acid
  VARIANT 34: note = Any amino acid
  VARIANT 35: note = Any amino acid
  VARIANT 36: note = Any amino acid
  VARIANT 37: note = Any amino acid
  VARIANT 38: note = Any amino acid
  VARIANT 39: note = Any amino acid
  VARIANT 40: note = Any amino acid
  VARIANT 41: note = Any amino acid
  VARIANT 42: note = Any amino acid
  VARIANT 43: note = Any amino acid
  VARIANT 44: note = Any amino acid
  VARIANT 45: note = Any amino acid
  VARIANT 46: note = Any amino acid
  VARIANT 47: note = Any amino acid
  VARIANT 48: note = Any amino acid
  VARIANT 49: note = Any amino acid
  VARIANT 50: note = Any amino acid
  VARIANT 52: note = Any amino acid
  VARIANT 53: note = Any amino acid
  VARIANT 54: note = Any amino acid
  VARIANT 55: note = Any amino acid
  VARIANT 56: note = Any amino acid
  VARIANT 57: note = Any amino acid
  VARIANT 58: note = Any amino acid
  VARIANT 59: note = Any amino acid
  VARIANT 60: note = Any amino acid
  VARIANT 61: note = Any amino acid
  VARIANT 62: note = Any amino acid
  VARIANT 63: note = Any amino acid
  VARIANT 64: note = Any amino acid
  VARIANT 65: note = Any amino acid
  VARIANT 66: note = Any amino acid
  VARIANT 67: note = Any amino acid
  VARIANT 68: note = Any amino acid
  VARIANT 69: note = Any amino acid
  VARIANT 70: note = Any amino acid
  VARIANT 71: note = Any amino acid
  VARIANT 72: note = Any amino acid
  VARIANT 73: note = Any amino acid
  VARIANT 74: note = Any amino acid
  VARIANT 75: note = Any amino acid
  VARIANT 76: note = Any amino acid
  VARIANT 77: note = Any amino acid
  VARIANT 78: note = Any amino acid
  VARIANT 79: note = Any amino acid
  VARIANT 80: note = Any amino acid
  VARIANT 81: note = Any amino acid
  VARIANT 82: note = Any amino acid
  VARIANT 83: note = Any amino acid
  VARIANT 84: note = Any amino acid
  VARIANT 85: note = Any amino acid
  VARIANT 86: note = Any amino acid
  VARIANT 87: note = Any amino acid
  VARIANT 88: note = Any amino acid
  VARIANT 90: note = Any amino acid
  VARIANT 92: note = Any amino acid
  VARIANT 93: note = Any amino acid
DXXXXXXXXXXXXXXXXXXXXXXXXXXXXXXXXXXXXXXXXXXXXXXXXXYXXXXXXXXXXXXXXXXXXXXXXXXXXXXXXXXXXXXXKXNXXD

SEQ ID NO: 796583 - protein, 93 aa, unidentified
  VARIANT 2: note = Any amino acid
  VARIANT 3: note = Any amino acid
  VARIANT 4: note = Any amino acid
  VARIANT 5: note = Any amino acid
  VARIANT 6: note = Any amino acid
  VARIANT 7: note = Any amino acid
  VARIANT 8: note = Any amino acid
  VARIANT 9: note = Any amino acid
  VARIANT 10: note = Any amino acid
  VARIANT 11: note = Any amino acid
  VARIANT 12: note = Any amino acid
  VARIANT 13: note = Any amino acid
  VARIANT 14: note = Any amino acid
  VARIANT 15: note = Any amino acid
  VARIANT 16: note = Any amino acid
  VARIANT 17: note = Any amino acid
  VARIANT 18: note = Any amino acid
  VARIANT 19: note = Any amino acid
  VARIANT 20: note = Any amino acid
  VARIANT 21: note = Any amino acid
  VARIANT 22: note = Any amino acid
  VARIANT 23: note = Any amino acid
  VARIANT 24: note = Any amino acid
  VARIANT 25: note = Any amino acid
  VARIANT 26: note = Any amino acid
  VARIANT 27: note = Any amino acid
  VARIANT 28: note = Any amino acid
  VARIANT 29: note = Any amino acid
  VARIANT 30: note = Any amino acid
  VARIANT 31: note = Any amino acid
  VARIANT 32: note = Any amino acid
  VARIANT 33: note = Any amino acid
  VARIANT 34: note = Any amino acid
  VARIANT 35: note = Any amino acid
  VARIANT 36: note = Any amino acid
  VARIANT 37: note = Any amino acid
  VARIANT 38: note = Any amino acid
  VARIANT 39: note = Any amino acid
  VARIANT 40: note = Any amino acid
  VARIANT 41: note = Any amino acid
  VARIANT 42: note = Any amino acid
  VARIANT 43: note = Any amino acid
  VARIANT 44: note = Any amino acid
  VARIANT 45: note = Any amino acid
  VARIANT 46: note = Any amino acid
  VARIANT 47: note = Any amino acid
  VARIANT 48: note = Any amino acid
  VARIANT 49: note = Any amino acid
  VARIANT 50: note = Any amino acid
  VARIANT 51: note = Any amino acid
  VARIANT 53: note = Any amino acid
  VARIANT 54: note = Any amino acid
  VARIANT 55: note = Any amino acid
  VARIANT 56: note = Any amino acid
  VARIANT 57: note = Any amino acid
  VARIANT 58: note = Any amino acid
  VARIANT 59: note = Any amino acid
  VARIANT 60: note = Any amino acid
  VARIANT 61: note = Any amino acid
  VARIANT 62: note = Any amino acid
  VARIANT 63: note = Any amino acid
  VARIANT 64: note = Any amino acid
  VARIANT 65: note = Any amino acid
  VARIANT 66: note = Any amino acid
  VARIANT 67: note = Any amino acid
  VARIANT 68: note = Any amino acid
  VARIANT 69: note = Any amino acid
  VARIANT 70: note = Any amino acid
  VARIANT 71: note = Any amino acid
  VARIANT 72: note = Any amino acid
  VARIANT 73: note = Any amino acid
  VARIANT 74: note = Any amino acid
  VARIANT 75: note = Any amino acid
  VARIANT 76: note = Any amino acid
  VARIANT 77: note = Any amino acid
  VARIANT 78: note = Any amino acid
  VARIANT 79: note = Any amino acid
  VARIANT 80: note = Any amino acid
  VARIANT 81: note = Any amino acid
  VARIANT 82: note = Any amino acid
  VARIANT 83: note = Any amino acid
  VARIANT 84: note = Any amino acid
  VARIANT 85: note = Any amino acid
  VARIANT 86: note = Any amino acid
  VARIANT 87: note = Any amino acid
  VARIANT 89: note = Any amino acid
  VARIANT 91: note = Any amino acid
  VARIANT 92: note = Any amino acid
DXXXXXXXXXXXXXXXXXXXXXXXXXXXXXXXXXXXXXXXXXXXXXXXXXXEXXXXXXXXXXXXXXXXXXXXXXXXXXXXXXXXXXXNXDXXD

SEQ ID NO: 796584 - protein, 98 aa, unidentified
  VARIANT 2: note = Any amino acid
  VARIANT 3: note = Any amino acid
  VARIANT 4: note = Any amino acid
  VARIANT 5: note = Any amino acid
  VARIANT 6: note = Any amino acid
  VARIANT 7: note = Any amino acid
  VARIANT 8: note = Any amino acid
  VARIANT 9: note = Any amino acid
  VARIANT 10: note = Any amino acid
  VARIANT 11: note = Any amino acid
  VARIANT 12: note = Any amino acid
  VARIANT 13: note = Any amino acid
  VARIANT 14: note = Any amino acid
  VARIANT 15: note = Any amino acid
  VARIANT 16: note = Any amino acid
  VARIANT 17: note = Any amino acid
  VARIANT 18: note = Any amino acid
  VARIANT 19: note = Any amino acid
  VARIANT 20: note = Any amino acid
  VARIANT 21: note = Any amino acid
  VARIANT 22: note = Any amino acid
  VARIANT 23: note = Any amino acid
  VARIANT 24: note = Any amino acid
  VARIANT 25: note = Any amino acid
  VARIANT 26: note = Any amino acid
  VARIANT 27: note = Any amino acid
  VARIANT 28: note = Any amino acid
  VARIANT 29: note = Any amino acid
  VARIANT 30: note = Any amino acid
  VARIANT 31: note = Any amino acid
  VARIANT 32: note = Any amino acid
  VARIANT 33: note = Any amino acid
  VARIANT 34: note = Any amino acid
  VARIANT 35: note = Any amino acid
  VARIANT 36: note = Any amino acid
  VARIANT 37: note = Any amino acid
  VARIANT 38: note = Any amino acid
  VARIANT 39: note = Any amino acid
  VARIANT 40: note = Any amino acid
  VARIANT 41: note = Any amino acid
  VARIANT 42: note = Any amino acid
  VARIANT 43: note = Any amino acid
  VARIANT 44: note = Any amino acid
  VARIANT 45: note = Any amino acid
  VARIANT 46: note = Any amino acid
  VARIANT 48: note = Any amino acid
  VARIANT 49: note = Any amino acid
  VARIANT 50: note = Any amino acid
  VARIANT 51: note = Any amino acid
  VARIANT 52: note = Any amino acid
  VARIANT 53: note = Any amino acid
  VARIANT 54: note = Any amino acid
  VARIANT 55: note = Any amino acid
  VARIANT 56: note = Any amino acid
  VARIANT 57: note = Any amino acid
  VARIANT 58: note = Any amino acid
  VARIANT 59: note = Any amino acid
  VARIANT 60: note = Any amino acid
  VARIANT 61: note = Any amino acid
  VARIANT 62: note = Any amino acid
  VARIANT 63: note = Any amino acid
  VARIANT 64: note = Any amino acid
  VARIANT 65: note = Any amino acid
  VARIANT 66: note = Any amino acid
  VARIANT 67: note = Any amino acid
  VARIANT 68: note = Any amino acid
  VARIANT 69: note = Any amino acid
  VARIANT 70: note = Any amino acid
  VARIANT 71: note = Any amino acid
  VARIANT 72: note = Any amino acid
  VARIANT 73: note = Any amino acid
  VARIANT 74: note = Any amino acid
  VARIANT 75: note = Any amino acid
  VARIANT 76: note = Any amino acid
  VARIANT 77: note = Any amino acid
  VARIANT 78: note = Any amino acid
  VARIANT 79: note = Any amino acid
  VARIANT 80: note = Any amino acid
  VARIANT 81: note = Any amino acid
  VARIANT 82: note = Any amino acid
  VARIANT 83: note = Any amino acid
  VARIANT 84: note = Any amino acid
  VARIANT 85: note = Any amino acid
  VARIANT 86: note = Any amino acid
  VARIANT 87: note = Any amino acid
  VARIANT 88: note = Any amino acid
  VARIANT 89: note = Any amino acid
  VARIANT 90: note = Any amino acid
  VARIANT 91: note = Any amino acid
  VARIANT 92: note = Any amino acid
  VARIANT 94: note = Any amino acid
  VARIANT 96: note = Any amino acid
  VARIANT 97: note = Any amino acid
DXXXXXXXXXXXXXXXXXXXXXXXXXXXXXXXXXXXXXXXXXXXXXEXXXXXXXXXXXXXXXXXXXXXXXXXXXXXXXXXXXXXXXXXXXXXKXDXXD

SEQ ID NO: 796585 - protein, 91 aa, unidentified
  VARIANT 2: note = Any amino acid
  VARIANT 3: note = Any amino acid
  VARIANT 4: note = Any amino acid
  VARIANT 5: note = Any amino acid
  VARIANT 6: note = Any amino acid
  VARIANT 7: note = Any amino acid
  VARIANT 8: note = Any amino acid
  VARIANT 9: note = Any amino acid
  VARIANT 10: note = Any amino acid
  VARIANT 11: note = Any amino acid
  VARIANT 12: note = Any amino acid
  VARIANT 13: note = Any amino acid
  VARIANT 14: note = Any amino acid
  VARIANT 15: note = Any amino acid
  VARIANT 16: note = Any amino acid
  VARIANT 17: note = Any amino acid
  VARIANT 18: note = Any amino acid
  VARIANT 19: note = Any amino acid
  VARIANT 20: note = Any amino acid
  VARIANT 21: note = Any amino acid
  VARIANT 22: note = Any amino acid
  VARIANT 23: note = Any amino acid
  VARIANT 24: note = Any amino acid
  VARIANT 25: note = Any amino acid
  VARIANT 26: note = Any amino acid
  VARIANT 27: note = Any amino acid
  VARIANT 28: note = Any amino acid
  VARIANT 29: note = Any amino acid
  VARIANT 30: note = Any amino acid
  VARIANT 31: note = Any amino acid
  VARIANT 32: note = Any amino acid
  VARIANT 33: note = Any amino acid
  VARIANT 34: note = Any amino acid
  VARIANT 35: note = Any amino acid
  VARIANT 36: note = Any amino acid
  VARIANT 37: note = Any amino acid
  VARIANT 38: note = Any amino acid
  VARIANT 39: note = Any amino acid
  VARIANT 40: note = Any amino acid
  VARIANT 41: note = Any amino acid
  VARIANT 42: note = Any amino acid
  VARIANT 43: note = Any amino acid
  VARIANT 44: note = Any amino acid
  VARIANT 45: note = Any amino acid
  VARIANT 46: note = Any amino acid
  VARIANT 47: note = Any amino acid
  VARIANT 49: note = Any amino acid
  VARIANT 50: note = Any amino acid
  VARIANT 51: note = Any amino acid
  VARIANT 52: note = Any amino acid
  VARIANT 53: note = Any amino acid
  VARIANT 54: note = Any amino acid
  VARIANT 55: note = Any amino acid
  VARIANT 56: note = Any amino acid
  VARIANT 57: note = Any amino acid
  VARIANT 58: note = Any amino acid
  VARIANT 59: note = Any amino acid
  VARIANT 60: note = Any amino acid
  VARIANT 61: note = Any amino acid
  VARIANT 62: note = Any amino acid
  VARIANT 63: note = Any amino acid
  VARIANT 64: note = Any amino acid
  VARIANT 65: note = Any amino acid
  VARIANT 66: note = Any amino acid
  VARIANT 67: note = Any amino acid
  VARIANT 68: note = Any amino acid
  VARIANT 69: note = Any amino acid
  VARIANT 70: note = Any amino acid
  VARIANT 71: note = Any amino acid
  VARIANT 72: note = Any amino acid
  VARIANT 73: note = Any amino acid
  VARIANT 74: note = Any amino acid
  VARIANT 75: note = Any amino acid
  VARIANT 76: note = Any amino acid
  VARIANT 77: note = Any amino acid
  VARIANT 78: note = Any amino acid
  VARIANT 79: note = Any amino acid
  VARIANT 80: note = Any amino acid
  VARIANT 81: note = Any amino acid
  VARIANT 82: note = Any amino acid
  VARIANT 83: note = Any amino acid
  VARIANT 84: note = Any amino acid
  VARIANT 85: note = Any amino acid
  VARIANT 87: note = Any amino acid
  VARIANT 89: note = Any amino acid
  VARIANT 90: note = Any amino acid
DXXXXXXXXXXXXXXXXXXXXXXXXXXXXXXXXXXXXXXXXXXXXXXAXXXXXXXXXXXXXXXXXXXXXXXXXXXXXXXXXXXXXKXDXXD

SEQ ID NO: 796586 - protein, 87 aa, unidentified
  VARIANT 2: note = Any amino acid
  VARIANT 3: note = Any amino acid
  VARIANT 4: note = Any amino acid
  VARIANT 5: note = Any amino acid
  VARIANT 6: note = Any amino acid
  VARIANT 7: note = Any amino acid
  VARIANT 8: note = Any amino acid
  VARIANT 9: note = Any amino acid
  VARIANT 10: note = Any amino acid
  VARIANT 11: note = Any amino acid
  VARIANT 12: note = Any amino acid
  VARIANT 13: note = Any amino acid
  VARIANT 14: note = Any amino acid
  VARIANT 15: note = Any amino acid
  VARIANT 16: note = Any amino acid
  VARIANT 17: note = Any amino acid
  VARIANT 18: note = Any amino acid
  VARIANT 19: note = Any amino acid
  VARIANT 20: note = Any amino acid
  VARIANT 21: note = Any amino acid
  VARIANT 22: note = Any amino acid
  VARIANT 23: note = Any amino acid
  VARIANT 24: note = Any amino acid
  VARIANT 25: note = Any amino acid
  VARIANT 26: note = Any amino acid
  VARIANT 27: note = Any amino acid
  VARIANT 28: note = Any amino acid
  VARIANT 29: note = Any amino acid
  VARIANT 30: note = Any amino acid
  VARIANT 31: note = Any amino acid
  VARIANT 32: note = Any amino acid
  VARIANT 33: note = Any amino acid
  VARIANT 34: note = Any amino acid
  VARIANT 35: note = Any amino acid
  VARIANT 36: note = Any amino acid
  VARIANT 37: note = Any amino acid
  VARIANT 38: note = Any amino acid
  VARIANT 39: note = Any amino acid
  VARIANT 40: note = Any amino acid
  VARIANT 41: note = Any amino acid
  VARIANT 42: note = Any amino acid
  VARIANT 43: note = Any amino acid
  VARIANT 44: note = Any amino acid
  VARIANT 45: note = Any amino acid
  VARIANT 46: note = Any amino acid
  VARIANT 47: note = Any amino acid
  VARIANT 48: note = Any amino acid
  VARIANT 49: note = Any amino acid
  VARIANT 51: note = Any amino acid
  VARIANT 52: note = Any amino acid
  VARIANT 53: note = Any amino acid
  VARIANT 54: note = Any amino acid
  VARIANT 55: note = Any amino acid
  VARIANT 56: note = Any amino acid
  VARIANT 57: note = Any amino acid
  VARIANT 58: note = Any amino acid
  VARIANT 59: note = Any amino acid
  VARIANT 60: note = Any amino acid
  VARIANT 61: note = Any amino acid
  VARIANT 62: note = Any amino acid
  VARIANT 63: note = Any amino acid
  VARIANT 64: note = Any amino acid
  VARIANT 65: note = Any amino acid
  VARIANT 66: note = Any amino acid
  VARIANT 67: note = Any amino acid
  VARIANT 68: note = Any amino acid
  VARIANT 69: note = Any amino acid
  VARIANT 70: note = Any amino acid
  VARIANT 71: note = Any amino acid
  VARIANT 72: note = Any amino acid
  VARIANT 73: note = Any amino acid
  VARIANT 74: note = Any amino acid
  VARIANT 75: note = Any amino acid
  VARIANT 76: note = Any amino acid
  VARIANT 77: note = Any amino acid
  VARIANT 78: note = Any amino acid
  VARIANT 79: note = Any amino acid
  VARIANT 80: note = Any amino acid
  VARIANT 81: note = Any amino acid
  VARIANT 83: note = Any amino acid
  VARIANT 85: note = Any amino acid
  VARIANT 86: note = Any amino acid
DXXXXXXXXXXXXXXXXXXXXXXXXXXXXXXXXXXXXXXXXXXXXXXXXEXXXXXXXXXXXXXXXXXXXXXXXXXXXXXXXKXDXXD

SEQ ID NO: 796587 - protein, 83 aa, unidentified
  VARIANT 2: note = Any amino acid
  VARIANT 3: note = Any amino acid
  VARIANT 4: note = Any amino acid
  VARIANT 5: note = Any amino acid
  VARIANT 6: note = Any amino acid
  VARIANT 7: note = Any amino acid
  VARIANT 8: note = Any amino acid
  VARIANT 9: note = Any amino acid
  VARIANT 10: note = Any amino acid
  VARIANT 11: note = Any amino acid
  VARIANT 12: note = Any amino acid
  VARIANT 13: note = Any amino acid
  VARIANT 14: note = Any amino acid
  VARIANT 15: note = Any amino acid
  VARIANT 16: note = Any amino acid
  VARIANT 17: note = Any amino acid
  VARIANT 18: note = Any amino acid
  VARIANT 19: note = Any amino acid
  VARIANT 20: note = Any amino acid
  VARIANT 21: note = Any amino acid
  VARIANT 22: note = Any amino acid
  VARIANT 23: note = Any amino acid
  VARIANT 24: note = Any amino acid
  VARIANT 25: note = Any amino acid
  VARIANT 26: note = Any amino acid
  VARIANT 27: note = Any amino acid
  VARIANT 28: note = Any amino acid
  VARIANT 29: note = Any amino acid
  VARIANT 30: note = Any amino acid
  VARIANT 31: note = Any amino acid
  VARIANT 32: note = Any amino acid
  VARIANT 33: note = Any amino acid
  VARIANT 34: note = Any amino acid
  VARIANT 35: note = Any amino acid
  VARIANT 36: note = Any amino acid
  VARIANT 37: note = Any amino acid
  VARIANT 38: note = Any amino acid
  VARIANT 39: note = Any amino acid
  VARIANT 40: note = Any amino acid
  VARIANT 41: note = Any amino acid
  VARIANT 42: note = Any amino acid
  VARIANT 43: note = Any amino acid
  VARIANT 44: note = Any amino acid
  VARIANT 46: note = Any amino acid
  VARIANT 47: note = Any amino acid
  VARIANT 48: note = Any amino acid
  VARIANT 49: note = Any amino acid
  VARIANT 50: note = Any amino acid
  VARIANT 51: note = Any amino acid
  VARIANT 52: note = Any amino acid
  VARIANT 53: note = Any amino acid
  VARIANT 54: note = Any amino acid
  VARIANT 55: note = Any amino acid
  VARIANT 56: note = Any amino acid
  VARIANT 57: note = Any amino acid
  VARIANT 58: note = Any amino acid
  VARIANT 59: note = Any amino acid
  VARIANT 60: note = Any amino acid
  VARIANT 61: note = Any amino acid
  VARIANT 62: note = Any amino acid
  VARIANT 63: note = Any amino acid
  VARIANT 64: note = Any amino acid
  VARIANT 65: note = Any amino acid
  VARIANT 66: note = Any amino acid
  VARIANT 67: note = Any amino acid
  VARIANT 68: note = Any amino acid
  VARIANT 69: note = Any amino acid
  VARIANT 70: note = Any amino acid
  VARIANT 71: note = Any amino acid
  VARIANT 72: note = Any amino acid
  VARIANT 73: note = Any amino acid
  VARIANT 74: note = Any amino acid
  VARIANT 75: note = Any amino acid
  VARIANT 76: note = Any amino acid
  VARIANT 77: note = Any amino acid
  VARIANT 79: note = Any amino acid
  VARIANT 81: note = Any amino acid
  VARIANT 82: note = Any amino acid
DXXXXXXXXXXXXXXXXXXXXXXXXXXXXXXXXXXXXXXXXXXXCXXXXXXXXXXXXXXXXXXXXXXXXXXXXXXXXKXDXXD

SEQ ID NO: 796588 - protein, 89 aa, unidentified
  VARIANT 2: note = Any amino acid
  VARIANT 3: note = Any amino acid
  VARIANT 4: note = Any amino acid
  VARIANT 5: note = Any amino acid
  VARIANT 6: note = Any amino acid
  VARIANT 7: note = Any amino acid
  VARIANT 8: note = Any amino acid
  VARIANT 9: note = Any amino acid
  VARIANT 10: note = Any amino acid
  VARIANT 11: note = Any amino acid
  VARIANT 12: note = Any amino acid
  VARIANT 13: note = Any amino acid
  VARIANT 14: note = Any amino acid
  VARIANT 15: note = Any amino acid
  VARIANT 16: note = Any amino acid
  VARIANT 17: note = Any amino acid
  VARIANT 18: note = Any amino acid
  VARIANT 19: note = Any amino acid
  VARIANT 20: note = Any amino acid
  VARIANT 21: note = Any amino acid
  VARIANT 22: note = Any amino acid
  VARIANT 23: note = Any amino acid
  VARIANT 24: note = Any amino acid
  VARIANT 25: note = Any amino acid
  VARIANT 26: note = Any amino acid
  VARIANT 27: note = Any amino acid
  VARIANT 28: note = Any amino acid
  VARIANT 29: note = Any amino acid
  VARIANT 30: note = Any amino acid
  VARIANT 31: note = Any amino acid
  VARIANT 32: note = Any amino acid
  VARIANT 33: note = Any amino acid
  VARIANT 34: note = Any amino acid
  VARIANT 35: note = Any amino acid
  VARIANT 36: note = Any amino acid
  VARIANT 37: note = Any amino acid
  VARIANT 38: note = Any amino acid
  VARIANT 39: note = Any amino acid
  VARIANT 40: note = Any amino acid
  VARIANT 41: note = Any amino acid
  VARIANT 42: note = Any amino acid
  VARIANT 43: note = Any amino acid
  VARIANT 44: note = Any amino acid
  VARIANT 45: note = Any amino acid
  VARIANT 47: note = Any amino acid
  VARIANT 48: note = Any amino acid
  VARIANT 49: note = Any amino acid
  VARIANT 50: note = Any amino acid
  VARIANT 51: note = Any amino acid
  VARIANT 52: note = Any amino acid
  VARIANT 53: note = Any amino acid
  VARIANT 54: note = Any amino acid
  VARIANT 55: note = Any amino acid
  VARIANT 56: note = Any amino acid
  VARIANT 57: note = Any amino acid
  VARIANT 58: note = Any amino acid
  VARIANT 59: note = Any amino acid
  VARIANT 60: note = Any amino acid
  VARIANT 61: note = Any amino acid
  VARIANT 62: note = Any amino acid
  VARIANT 63: note = Any amino acid
  VARIANT 64: note = Any amino acid
  VARIANT 65: note = Any amino acid
  VARIANT 66: note = Any amino acid
  VARIANT 67: note = Any amino acid
  VARIANT 68: note = Any amino acid
  VARIANT 69: note = Any amino acid
  VARIANT 70: note = Any amino acid
  VARIANT 71: note = Any amino acid
  VARIANT 72: note = Any amino acid
  VARIANT 73: note = Any amino acid
  VARIANT 74: note = Any amino acid
  VARIANT 75: note = Any amino acid
  VARIANT 76: note = Any amino acid
  VARIANT 77: note = Any amino acid
  VARIANT 78: note = Any amino acid
  VARIANT 79: note = Any amino acid
  VARIANT 80: note = Any amino acid
  VARIANT 81: note = Any amino acid
  VARIANT 82: note = Any amino acid
  VARIANT 83: note = Any amino acid
  VARIANT 85: note = Any amino acid
  VARIANT 87: note = Any amino acid
  VARIANT 88: note = Any amino acid
DXXXXXXXXXXXXXXXXXXXXXXXXXXXXXXXXXXXXXXXXXXXXYXXXXXXXXXXXXXXXXXXXXXXXXXXXXXXXXXXXXXKXDXXD

SEQ ID NO: 796589 - protein, 92 aa, unidentified
  VARIANT 2: note = Any amino acid
  VARIANT 3: note = Any amino acid
  VARIANT 4: note = Any amino acid
  VARIANT 5: note = Any amino acid
  VARIANT 6: note = Any amino acid
  VARIANT 7: note = Any amino acid
  VARIANT 8: note = Any amino acid
  VARIANT 9: note = Any amino acid
  VARIANT 10: note = Any amino acid
  VARIANT 11: note = Any amino acid
  VARIANT 12: note = Any amino acid
  VARIANT 13: note = Any amino acid
  VARIANT 14: note = Any amino acid
  VARIANT 15: note = Any amino acid
  VARIANT 16: note = Any amino acid
  VARIANT 17: note = Any amino acid
  VARIANT 18: note = Any amino acid
  VARIANT 19: note = Any amino acid
  VARIANT 20: note = Any amino acid
  VARIANT 21: note = Any amino acid
  VARIANT 22: note = Any amino acid
  VARIANT 23: note = Any amino acid
  VARIANT 24: note = Any amino acid
  VARIANT 25: note = Any amino acid
  VARIANT 26: note = Any amino acid
  VARIANT 27: note = Any amino acid
  VARIANT 28: note = Any amino acid
  VARIANT 29: note = Any amino acid
  VARIANT 30: note = Any amino acid
  VARIANT 31: note = Any amino acid
  VARIANT 32: note = Any amino acid
  VARIANT 33: note = Any amino acid
  VARIANT 34: note = Any amino acid
  VARIANT 35: note = Any amino acid
  VARIANT 36: note = Any amino acid
  VARIANT 37: note = Any amino acid
  VARIANT 38: note = Any amino acid
  VARIANT 39: note = Any amino acid
  VARIANT 40: note = Any amino acid
  VARIANT 41: note = Any amino acid
  VARIANT 42: note = Any amino acid
  VARIANT 43: note = Any amino acid
  VARIANT 44: note = Any amino acid
  VARIANT 45: note = Any amino acid
  VARIANT 46: note = Any amino acid
  VARIANT 47: note = Any amino acid
  VARIANT 48: note = Any amino acid
  VARIANT 49: note = Any amino acid
  VARIANT 51: note = Any amino acid
  VARIANT 52: note = Any amino acid
  VARIANT 53: note = Any amino acid
  VARIANT 54: note = Any amino acid
  VARIANT 55: note = Any amino acid
  VARIANT 56: note = Any amino acid
  VARIANT 57: note = Any amino acid
  VARIANT 58: note = Any amino acid
  VARIANT 59: note = Any amino acid
  VARIANT 60: note = Any amino acid
  VARIANT 61: note = Any amino acid
  VARIANT 62: note = Any amino acid
  VARIANT 63: note = Any amino acid
  VARIANT 64: note = Any amino acid
  VARIANT 65: note = Any amino acid
  VARIANT 66: note = Any amino acid
  VARIANT 67: note = Any amino acid
  VARIANT 68: note = Any amino acid
  VARIANT 69: note = Any amino acid
  VARIANT 70: note = Any amino acid
  VARIANT 71: note = Any amino acid
  VARIANT 72: note = Any amino acid
  VARIANT 73: note = Any amino acid
  VARIANT 74: note = Any amino acid
  VARIANT 75: note = Any amino acid
  VARIANT 76: note = Any amino acid
  VARIANT 77: note = Any amino acid
  VARIANT 78: note = Any amino acid
  VARIANT 79: note = Any amino acid
  VARIANT 80: note = Any amino acid
  VARIANT 81: note = Any amino acid
  VARIANT 82: note = Any amino acid
  VARIANT 83: note = Any amino acid
  VARIANT 84: note = Any amino acid
  VARIANT 85: note = Any amino acid
  VARIANT 86: note = Any amino acid
  VARIANT 88: note = Any amino acid
  VARIANT 90: note = Any amino acid
  VARIANT 91: note = Any amino acid
DXXXXXXXXXXXXXXXXXXXXXXXXXXXXXXXXXXXXXXXXXXXXXXXXYXXXXXXXXXXXXXXXXXXXXXXXXXXXXXXXXXXXXKXNXXD

SEQ ID NO: 796590 - protein, 94 aa, unidentified
  VARIANT 2: note = Any amino acid
  VARIANT 3: note = Any amino acid
  VARIANT 4: note = Any amino acid
  VARIANT 5: note = Any amino acid
  VARIANT 6: note = Any amino acid
  VARIANT 7: note = Any amino acid
  VARIANT 8: note = Any amino acid
  VARIANT 9: note = Any amino acid
  VARIANT 10: note = Any amino acid
  VARIANT 11: note = Any amino acid
  VARIANT 12: note = Any amino acid
  VARIANT 13: note = Any amino acid
  VARIANT 14: note = Any amino acid
  VARIANT 15: note = Any amino acid
  VARIANT 16: note = Any amino acid
  VARIANT 17: note = Any amino acid
  VARIANT 18: note = Any amino acid
  VARIANT 19: note = Any amino acid
  VARIANT 20: note = Any amino acid
  VARIANT 21: note = Any amino acid
  VARIANT 22: note = Any amino acid
  VARIANT 23: note = Any amino acid
  VARIANT 24: note = Any amino acid
  VARIANT 25: note = Any amino acid
  VARIANT 26: note = Any amino acid
  VARIANT 27: note = Any amino acid
  VARIANT 28: note = Any amino acid
  VARIANT 29: note = Any amino acid
  VARIANT 30: note = Any amino acid
  VARIANT 31: note = Any amino acid
  VARIANT 32: note = Any amino acid
  VARIANT 33: note = Any amino acid
  VARIANT 34: note = Any amino acid
  VARIANT 35: note = Any amino acid
  VARIANT 36: note = Any amino acid
  VARIANT 37: note = Any amino acid
  VARIANT 38: note = Any amino acid
  VARIANT 39: note = Any amino acid
  VARIANT 40: note = Any amino acid
  VARIANT 41: note = Any amino acid
  VARIANT 42: note = Any amino acid
  VARIANT 43: note = Any amino acid
  VARIANT 44: note = Any amino acid
  VARIANT 45: note = Any amino acid
  VARIANT 46: note = Any amino acid
  VARIANT 47: note = Any amino acid
  VARIANT 48: note = Any amino acid
  VARIANT 49: note = Any amino acid
  VARIANT 50: note = Any amino acid
  VARIANT 52: note = Any amino acid
  VARIANT 53: note = Any amino acid
  VARIANT 54: note = Any amino acid
  VARIANT 55: note = Any amino acid
  VARIANT 56: note = Any amino acid
  VARIANT 57: note = Any amino acid
  VARIANT 58: note = Any amino acid
  VARIANT 59: note = Any amino acid
  VARIANT 60: note = Any amino acid
  VARIANT 61: note = Any amino acid
  VARIANT 62: note = Any amino acid
  VARIANT 63: note = Any amino acid
  VARIANT 64: note = Any amino acid
  VARIANT 65: note = Any amino acid
  VARIANT 66: note = Any amino acid
  VARIANT 67: note = Any amino acid
  VARIANT 68: note = Any amino acid
  VARIANT 69: note = Any amino acid
  VARIANT 70: note = Any amino acid
  VARIANT 71: note = Any amino acid
  VARIANT 72: note = Any amino acid
  VARIANT 73: note = Any amino acid
  VARIANT 74: note = Any amino acid
  VARIANT 75: note = Any amino acid
  VARIANT 76: note = Any amino acid
  VARIANT 77: note = Any amino acid
  VARIANT 78: note = Any amino acid
  VARIANT 79: note = Any amino acid
  VARIANT 80: note = Any amino acid
  VARIANT 81: note = Any amino acid
  VARIANT 82: note = Any amino acid
  VARIANT 83: note = Any amino acid
  VARIANT 84: note = Any amino acid
  VARIANT 85: note = Any amino acid
  VARIANT 86: note = Any amino acid
  VARIANT 87: note = Any amino acid
  VARIANT 88: note = Any amino acid
  VARIANT 90: note = Any amino acid
  VARIANT 92: note = Any amino acid
  VARIANT 93: note = Any amino acid
DXXXXXXXXXXXXXXXXXXXXXXXXXXXXXXXXXXXXXXXXXXXXXXXXXCXXXXXXXXXXXXXXXXXXXXXXXXXXXXXXXXXXXXXKXDXXD

SEQ ID NO: 796591 - protein, 94 aa, unidentified
  VARIANT 2: note = Any amino acid
  VARIANT 3: note = Any amino acid
  VARIANT 4: note = Any amino acid
  VARIANT 5: note = Any amino acid
  VARIANT 6: note = Any amino acid
  VARIANT 7: note = Any amino acid
  VARIANT 8: note = Any amino acid
  VARIANT 9: note = Any amino acid
  VARIANT 10: note = Any amino acid
  VARIANT 11: note = Any amino acid
  VARIANT 12: note = Any amino acid
  VARIANT 13: note = Any amino acid
  VARIANT 14: note = Any amino acid
  VARIANT 15: note = Any amino acid
  VARIANT 16: note = Any amino acid
  VARIANT 17: note = Any amino acid
  VARIANT 18: note = Any amino acid
  VARIANT 19: note = Any amino acid
  VARIANT 20: note = Any amino acid
  VARIANT 21: note = Any amino acid
  VARIANT 22: note = Any amino acid
  VARIANT 23: note = Any amino acid
  VARIANT 24: note = Any amino acid
  VARIANT 25: note = Any amino acid
  VARIANT 26: note = Any amino acid
  VARIANT 27: note = Any amino acid
  VARIANT 28: note = Any amino acid
  VARIANT 29: note = Any amino acid
  VARIANT 30: note = Any amino acid
  VARIANT 31: note = Any amino acid
  VARIANT 32: note = Any amino acid
  VARIANT 33: note = Any amino acid
  VARIANT 34: note = Any amino acid
  VARIANT 35: note = Any amino acid
  VARIANT 36: note = Any amino acid
  VARIANT 37: note = Any amino acid
  VARIANT 38: note = Any amino acid
  VARIANT 39: note = Any amino acid
  VARIANT 40: note = Any amino acid
  VARIANT 41: note = Any amino acid
  VARIANT 42: note = Any amino acid
  VARIANT 43: note = Any amino acid
  VARIANT 44: note = Any amino acid
  VARIANT 45: note = Any amino acid
  VARIANT 46: note = Any amino acid
  VARIANT 47: note = Any amino acid
  VARIANT 48: note = Any amino acid
  VARIANT 49: note = Any amino acid
  VARIANT 50: note = Any amino acid
  VARIANT 51: note = Any amino acid
  VARIANT 53: note = Any amino acid
  VARIANT 54: note = Any amino acid
  VARIANT 55: note = Any amino acid
  VARIANT 56: note = Any amino acid
  VARIANT 57: note = Any amino acid
  VARIANT 58: note = Any amino acid
  VARIANT 59: note = Any amino acid
  VARIANT 60: note = Any amino acid
  VARIANT 61: note = Any amino acid
  VARIANT 62: note = Any amino acid
  VARIANT 63: note = Any amino acid
  VARIANT 64: note = Any amino acid
  VARIANT 65: note = Any amino acid
  VARIANT 66: note = Any amino acid
  VARIANT 67: note = Any amino acid
  VARIANT 68: note = Any amino acid
  VARIANT 69: note = Any amino acid
  VARIANT 70: note = Any amino acid
  VARIANT 71: note = Any amino acid
  VARIANT 72: note = Any amino acid
  VARIANT 73: note = Any amino acid
  VARIANT 74: note = Any amino acid
  VARIANT 75: note = Any amino acid
  VARIANT 76: note = Any amino acid
  VARIANT 77: note = Any amino acid
  VARIANT 78: note = Any amino acid
  VARIANT 79: note = Any amino acid
  VARIANT 80: note = Any amino acid
  VARIANT 81: note = Any amino acid
  VARIANT 82: note = Any amino acid
  VARIANT 83: note = Any amino acid
  VARIANT 84: note = Any amino acid
  VARIANT 85: note = Any amino acid
  VARIANT 86: note = Any amino acid
  VARIANT 87: note = Any amino acid
  VARIANT 88: note = Any amino acid
  VARIANT 90: note = Any amino acid
  VARIANT 92: note = Any amino acid
  VARIANT 93: note = Any amino acid
DXXXXXXXXXXXXXXXXXXXXXXXXXXXXXXXXXXXXXXXXXXXXXXXXXXGXXXXXXXXXXXXXXXXXXXXXXXXXXXXXXXXXXXXKXDXXD

SEQ ID NO: 796592 - protein, 87 aa, unidentified
  VARIANT 2: note = Any amino acid
  VARIANT 3: note = Any amino acid
  VARIANT 4: note = Any amino acid
  VARIANT 5: note = Any amino acid
  VARIANT 6: note = Any amino acid
  VARIANT 7: note = Any amino acid
  VARIANT 8: note = Any amino acid
  VARIANT 9: note = Any amino acid
  VARIANT 10: note = Any amino acid
  VARIANT 11: note = Any amino acid
  VARIANT 12: note = Any amino acid
  VARIANT 13: note = Any amino acid
  VARIANT 14: note = Any amino acid
  VARIANT 15: note = Any amino acid
  VARIANT 16: note = Any amino acid
  VARIANT 17: note = Any amino acid
  VARIANT 18: note = Any amino acid
  VARIANT 19: note = Any amino acid
  VARIANT 20: note = Any amino acid
  VARIANT 21: note = Any amino acid
  VARIANT 22: note = Any amino acid
  VARIANT 23: note = Any amino acid
  VARIANT 24: note = Any amino acid
  VARIANT 25: note = Any amino acid
  VARIANT 26: note = Any amino acid
  VARIANT 27: note = Any amino acid
  VARIANT 28: note = Any amino acid
  VARIANT 29: note = Any amino acid
  VARIANT 30: note = Any amino acid
  VARIANT 31: note = Any amino acid
  VARIANT 32: note = Any amino acid
  VARIANT 33: note = Any amino acid
  VARIANT 34: note = Any amino acid
  VARIANT 35: note = Any amino acid
  VARIANT 36: note = Any amino acid
  VARIANT 37: note = Any amino acid
  VARIANT 38: note = Any amino acid
  VARIANT 39: note = Any amino acid
  VARIANT 40: note = Any amino acid
  VARIANT 41: note = Any amino acid
  VARIANT 42: note = Any amino acid
  VARIANT 43: note = Any amino acid
  VARIANT 44: note = Any amino acid
  VARIANT 46: note = Any amino acid
  VARIANT 47: note = Any amino acid
  VARIANT 48: note = Any amino acid
  VARIANT 49: note = Any amino acid
  VARIANT 50: note = Any amino acid
  VARIANT 51: note = Any amino acid
  VARIANT 52: note = Any amino acid
  VARIANT 53: note = Any amino acid
  VARIANT 54: note = Any amino acid
  VARIANT 55: note = Any amino acid
  VARIANT 56: note = Any amino acid
  VARIANT 57: note = Any amino acid
  VARIANT 58: note = Any amino acid
  VARIANT 59: note = Any amino acid
  VARIANT 60: note = Any amino acid
  VARIANT 61: note = Any amino acid
  VARIANT 62: note = Any amino acid
  VARIANT 63: note = Any amino acid
  VARIANT 64: note = Any amino acid
  VARIANT 65: note = Any amino acid
  VARIANT 66: note = Any amino acid
  VARIANT 67: note = Any amino acid
  VARIANT 68: note = Any amino acid
  VARIANT 69: note = Any amino acid
  VARIANT 70: note = Any amino acid
  VARIANT 71: note = Any amino acid
  VARIANT 72: note = Any amino acid
  VARIANT 73: note = Any amino acid
  VARIANT 74: note = Any amino acid
  VARIANT 75: note = Any amino acid
  VARIANT 76: note = Any amino acid
  VARIANT 77: note = Any amino acid
  VARIANT 78: note = Any amino acid
  VARIANT 79: note = Any amino acid
  VARIANT 80: note = Any amino acid
  VARIANT 81: note = Any amino acid
  VARIANT 83: note = Any amino acid
  VARIANT 85: note = Any amino acid
  VARIANT 86: note = Any amino acid
DXXXXXXXXXXXXXXXXXXXXXXXXXXXXXXXXXXXXXXXXXXXLXXXXXXXXXXXXXXXXXXXXXXXXXXXXXXXXXXXXKXDXXD

SEQ ID NO: 796593 - protein, 90 aa, unidentified
  VARIANT 2: note = Any amino acid
  VARIANT 3: note = Any amino acid
  VARIANT 4: note = Any amino acid
  VARIANT 5: note = Any amino acid
  VARIANT 6: note = Any amino acid
  VARIANT 7: note = Any amino acid
  VARIANT 8: note = Any amino acid
  VARIANT 9: note = Any amino acid
  VARIANT 10: note = Any amino acid
  VARIANT 11: note = Any amino acid
  VARIANT 12: note = Any amino acid
  VARIANT 13: note = Any amino acid
  VARIANT 14: note = Any amino acid
  VARIANT 15: note = Any amino acid
  VARIANT 16: note = Any amino acid
  VARIANT 17: note = Any amino acid
  VARIANT 18: note = Any amino acid
  VARIANT 19: note = Any amino acid
  VARIANT 20: note = Any amino acid
  VARIANT 21: note = Any amino acid
  VARIANT 22: note = Any amino acid
  VARIANT 23: note = Any amino acid
  VARIANT 24: note = Any amino acid
  VARIANT 25: note = Any amino acid
  VARIANT 26: note = Any amino acid
  VARIANT 27: note = Any amino acid
  VARIANT 28: note = Any amino acid
  VARIANT 29: note = Any amino acid
  VARIANT 30: note = Any amino acid
  VARIANT 31: note = Any amino acid
  VARIANT 32: note = Any amino acid
  VARIANT 33: note = Any amino acid
  VARIANT 34: note = Any amino acid
  VARIANT 35: note = Any amino acid
  VARIANT 36: note = Any amino acid
  VARIANT 37: note = Any amino acid
  VARIANT 38: note = Any amino acid
  VARIANT 39: note = Any amino acid
  VARIANT 40: note = Any amino acid
  VARIANT 41: note = Any amino acid
  VARIANT 42: note = Any amino acid
  VARIANT 43: note = Any amino acid
  VARIANT 44: note = Any amino acid
  VARIANT 45: note = Any amino acid
  VARIANT 47: note = Any amino acid
  VARIANT 48: note = Any amino acid
  VARIANT 49: note = Any amino acid
  VARIANT 50: note = Any amino acid
  VARIANT 51: note = Any amino acid
  VARIANT 52: note = Any amino acid
  VARIANT 53: note = Any amino acid
  VARIANT 54: note = Any amino acid
  VARIANT 55: note = Any amino acid
  VARIANT 56: note = Any amino acid
  VARIANT 57: note = Any amino acid
  VARIANT 58: note = Any amino acid
  VARIANT 59: note = Any amino acid
  VARIANT 60: note = Any amino acid
  VARIANT 61: note = Any amino acid
  VARIANT 62: note = Any amino acid
  VARIANT 63: note = Any amino acid
  VARIANT 64: note = Any amino acid
  VARIANT 65: note = Any amino acid
  VARIANT 66: note = Any amino acid
  VARIANT 67: note = Any amino acid
  VARIANT 68: note = Any amino acid
  VARIANT 69: note = Any amino acid
  VARIANT 70: note = Any amino acid
  VARIANT 71: note = Any amino acid
  VARIANT 72: note = Any amino acid
  VARIANT 73: note = Any amino acid
  VARIANT 74: note = Any amino acid
  VARIANT 75: note = Any amino acid
  VARIANT 76: note = Any amino acid
  VARIANT 77: note = Any amino acid
  VARIANT 78: note = Any amino acid
  VARIANT 79: note = Any amino acid
  VARIANT 80: note = Any amino acid
  VARIANT 81: note = Any amino acid
  VARIANT 82: note = Any amino acid
  VARIANT 83: note = Any amino acid
  VARIANT 84: note = Any amino acid
  VARIANT 86: note = Any amino acid
  VARIANT 88: note = Any amino acid
  VARIANT 89: note = Any amino acid
DXXXXXXXXXXXXXXXXXXXXXXXXXXXXXXXXXXXXXXXXXXXXIXXXXXXXXXXXXXXXXXXXXXXXXXXXXXXXXXXXXXXKXDXXD

SEQ ID NO: 796594 - protein, 90 aa, unidentified
  VARIANT 2: note = Any amino acid
  VARIANT 3: note = Any amino acid
  VARIANT 4: note = Any amino acid
  VARIANT 5: note = Any amino acid
  VARIANT 6: note = Any amino acid
  VARIANT 7: note = Any amino acid
  VARIANT 8: note = Any amino acid
  VARIANT 9: note = Any amino acid
  VARIANT 10: note = Any amino acid
  VARIANT 11: note = Any amino acid
  VARIANT 12: note = Any amino acid
  VARIANT 13: note = Any amino acid
  VARIANT 14: note = Any amino acid
  VARIANT 15: note = Any amino acid
  VARIANT 16: note = Any amino acid
  VARIANT 17: note = Any amino acid
  VARIANT 18: note = Any amino acid
  VARIANT 19: note = Any amino acid
  VARIANT 20: note = Any amino acid
  VARIANT 21: note = Any amino acid
  VARIANT 22: note = Any amino acid
  VARIANT 23: note = Any amino acid
  VARIANT 24: note = Any amino acid
  VARIANT 25: note = Any amino acid
  VARIANT 26: note = Any amino acid
  VARIANT 27: note = Any amino acid
  VARIANT 28: note = Any amino acid
  VARIANT 29: note = Any amino acid
  VARIANT 30: note = Any amino acid
  VARIANT 31: note = Any amino acid
  VARIANT 32: note = Any amino acid
  VARIANT 33: note = Any amino acid
  VARIANT 34: note = Any amino acid
  VARIANT 35: note = Any amino acid
  VARIANT 36: note = Any amino acid
  VARIANT 37: note = Any amino acid
  VARIANT 38: note = Any amino acid
  VARIANT 39: note = Any amino acid
  VARIANT 40: note = Any amino acid
  VARIANT 41: note = Any amino acid
  VARIANT 42: note = Any amino acid
  VARIANT 43: note = Any amino acid
  VARIANT 44: note = Any amino acid
  VARIANT 45: note = Any amino acid
  VARIANT 46: note = Any amino acid
  VARIANT 48: note = Any amino acid
  VARIANT 49: note = Any amino acid
  VARIANT 50: note = Any amino acid
  VARIANT 51: note = Any amino acid
  VARIANT 52: note = Any amino acid
  VARIANT 53: note = Any amino acid
  VARIANT 54: note = Any amino acid
  VARIANT 55: note = Any amino acid
  VARIANT 56: note = Any amino acid
  VARIANT 57: note = Any amino acid
  VARIANT 58: note = Any amino acid
  VARIANT 59: note = Any amino acid
  VARIANT 60: note = Any amino acid
  VARIANT 61: note = Any amino acid
  VARIANT 62: note = Any amino acid
  VARIANT 63: note = Any amino acid
  VARIANT 64: note = Any amino acid
  VARIANT 65: note = Any amino acid
  VARIANT 66: note = Any amino acid
  VARIANT 67: note = Any amino acid
  VARIANT 68: note = Any amino acid
  VARIANT 69: note = Any amino acid
  VARIANT 70: note = Any amino acid
  VARIANT 71: note = Any amino acid
  VARIANT 72: note = Any amino acid
  VARIANT 73: note = Any amino acid
  VARIANT 74: note = Any amino acid
  VARIANT 75: note = Any amino acid
  VARIANT 76: note = Any amino acid
  VARIANT 77: note = Any amino acid
  VARIANT 78: note = Any amino acid
  VARIANT 79: note = Any amino acid
  VARIANT 80: note = Any amino acid
  VARIANT 81: note = Any amino acid
  VARIANT 82: note = Any amino acid
  VARIANT 83: note = Any amino acid
  VARIANT 84: note = Any amino acid
  VARIANT 86: note = Any amino acid
  VARIANT 88: note = Any amino acid
  VARIANT 89: note = Any amino acid
DXXXXXXXXXXXXXXXXXXXXXXXXXXXXXXXXXXXXXXXXXXXXXYXXXXXXXXXXXXXXXXXXXXXXXXXXXXXXXXXXXXXRXDXXD

SEQ ID NO: 796595 - protein, 83 aa, unidentified
  VARIANT 2: note = Any amino acid
  VARIANT 3: note = Any amino acid
  VARIANT 4: note = Any amino acid
  VARIANT 5: note = Any amino acid
  VARIANT 6: note = Any amino acid
  VARIANT 7: note = Any amino acid
  VARIANT 8: note = Any amino acid
  VARIANT 9: note = Any amino acid
  VARIANT 10: note = Any amino acid
  VARIANT 11: note = Any amino acid
  VARIANT 12: note = Any amino acid
  VARIANT 13: note = Any amino acid
  VARIANT 14: note = Any amino acid
  VARIANT 15: note = Any amino acid
  VARIANT 16: note = Any amino acid
  VARIANT 17: note = Any amino acid
  VARIANT 18: note = Any amino acid
  VARIANT 19: note = Any amino acid
  VARIANT 20: note = Any amino acid
  VARIANT 21: note = Any amino acid
  VARIANT 22: note = Any amino acid
  VARIANT 23: note = Any amino acid
  VARIANT 24: note = Any amino acid
  VARIANT 25: note = Any amino acid
  VARIANT 26: note = Any amino acid
  VARIANT 27: note = Any amino acid
  VARIANT 28: note = Any amino acid
  VARIANT 29: note = Any amino acid
  VARIANT 30: note = Any amino acid
  VARIANT 31: note = Any amino acid
  VARIANT 32: note = Any amino acid
  VARIANT 33: note = Any amino acid
  VARIANT 34: note = Any amino acid
  VARIANT 35: note = Any amino acid
  VARIANT 36: note = Any amino acid
  VARIANT 37: note = Any amino acid
  VARIANT 38: note = Any amino acid
  VARIANT 39: note = Any amino acid
  VARIANT 40: note = Any amino acid
  VARIANT 41: note = Any amino acid
  VARIANT 42: note = Any amino acid
  VARIANT 43: note = Any amino acid
  VARIANT 44: note = Any amino acid
  VARIANT 45: note = Any amino acid
  VARIANT 47: note = Any amino acid
  VARIANT 48: note = Any amino acid
  VARIANT 49: note = Any amino acid
  VARIANT 50: note = Any amino acid
  VARIANT 51: note = Any amino acid
  VARIANT 52: note = Any amino acid
  VARIANT 53: note = Any amino acid
  VARIANT 54: note = Any amino acid
  VARIANT 55: note = Any amino acid
  VARIANT 56: note = Any amino acid
  VARIANT 57: note = Any amino acid
  VARIANT 58: note = Any amino acid
  VARIANT 59: note = Any amino acid
  VARIANT 60: note = Any amino acid
  VARIANT 61: note = Any amino acid
  VARIANT 62: note = Any amino acid
  VARIANT 63: note = Any amino acid
  VARIANT 64: note = Any amino acid
  VARIANT 65: note = Any amino acid
  VARIANT 66: note = Any amino acid
  VARIANT 67: note = Any amino acid
  VARIANT 68: note = Any amino acid
  VARIANT 69: note = Any amino acid
  VARIANT 70: note = Any amino acid
  VARIANT 71: note = Any amino acid
  VARIANT 72: note = Any amino acid
  VARIANT 73: note = Any amino acid
  VARIANT 74: note = Any amino acid
  VARIANT 75: note = Any amino acid
  VARIANT 76: note = Any amino acid
  VARIANT 77: note = Any amino acid
  VARIANT 79: note = Any amino acid
  VARIANT 81: note = Any amino acid
  VARIANT 82: note = Any amino acid
DXXXXXXXXXXXXXXXXXXXXXXXXXXXXXXXXXXXXXXXXXXXXFXXXXXXXXXXXXXXXXXXXXXXXXXXXXXXXKXDXXD

SEQ ID NO: 796596 - protein, 91 aa, unidentified
  VARIANT 2: note = Any amino acid
  VARIANT 3: note = Any amino acid
  VARIANT 4: note = Any amino acid
  VARIANT 5: note = Any amino acid
  VARIANT 6: note = Any amino acid
  VARIANT 7: note = Any amino acid
  VARIANT 8: note = Any amino acid
  VARIANT 9: note = Any amino acid
  VARIANT 10: note = Any amino acid
  VARIANT 11: note = Any amino acid
  VARIANT 12: note = Any amino acid
  VARIANT 13: note = Any amino acid
  VARIANT 14: note = Any amino acid
  VARIANT 15: note = Any amino acid
  VARIANT 16: note = Any amino acid
  VARIANT 17: note = Any amino acid
  VARIANT 18: note = Any amino acid
  VARIANT 19: note = Any amino acid
  VARIANT 20: note = Any amino acid
  VARIANT 21: note = Any amino acid
  VARIANT 22: note = Any amino acid
  VARIANT 23: note = Any amino acid
  VARIANT 24: note = Any amino acid
  VARIANT 25: note = Any amino acid
  VARIANT 26: note = Any amino acid
  VARIANT 27: note = Any amino acid
  VARIANT 28: note = Any amino acid
  VARIANT 29: note = Any amino acid
  VARIANT 30: note = Any amino acid
  VARIANT 31: note = Any amino acid
  VARIANT 32: note = Any amino acid
  VARIANT 33: note = Any amino acid
  VARIANT 34: note = Any amino acid
  VARIANT 35: note = Any amino acid
  VARIANT 36: note = Any amino acid
  VARIANT 37: note = Any amino acid
  VARIANT 38: note = Any amino acid
  VARIANT 39: note = Any amino acid
  VARIANT 40: note = Any amino acid
  VARIANT 41: note = Any amino acid
  VARIANT 42: note = Any amino acid
  VARIANT 43: note = Any amino acid
  VARIANT 44: note = Any amino acid
  VARIANT 45: note = Any amino acid
  VARIANT 46: note = Any amino acid
  VARIANT 47: note = Any amino acid
  VARIANT 48: note = Any amino acid
  VARIANT 49: note = Any amino acid
  VARIANT 51: note = Any amino acid
  VARIANT 52: note = Any amino acid
  VARIANT 53: note = Any amino acid
  VARIANT 54: note = Any amino acid
  VARIANT 55: note = Any amino acid
  VARIANT 56: note = Any amino acid
  VARIANT 57: note = Any amino acid
  VARIANT 58: note = Any amino acid
  VARIANT 59: note = Any amino acid
  VARIANT 60: note = Any amino acid
  VARIANT 61: note = Any amino acid
  VARIANT 62: note = Any amino acid
  VARIANT 63: note = Any amino acid
  VARIANT 64: note = Any amino acid
  VARIANT 65: note = Any amino acid
  VARIANT 66: note = Any amino acid
  VARIANT 67: note = Any amino acid
  VARIANT 68: note = Any amino acid
  VARIANT 69: note = Any amino acid
  VARIANT 70: note = Any amino acid
  VARIANT 71: note = Any amino acid
  VARIANT 72: note = Any amino acid
  VARIANT 73: note = Any amino acid
  VARIANT 74: note = Any amino acid
  VARIANT 75: note = Any amino acid
  VARIANT 76: note = Any amino acid
  VARIANT 77: note = Any amino acid
  VARIANT 78: note = Any amino acid
  VARIANT 79: note = Any amino acid
  VARIANT 80: note = Any amino acid
  VARIANT 81: note = Any amino acid
  VARIANT 82: note = Any amino acid
  VARIANT 83: note = Any amino acid
  VARIANT 84: note = Any amino acid
  VARIANT 85: note = Any amino acid
  VARIANT 87: note = Any amino acid
  VARIANT 89: note = Any amino acid
  VARIANT 90: note = Any amino acid
DXXXXXXXXXXXXXXXXXXXXXXXXXXXXXXXXXXXXXXXXXXXXXXXXEXXXXXXXXXXXXXXXXXXXXXXXXXXXXXXXXXXXKXNXXD

SEQ ID NO: 796597 - protein, 92 aa, unidentified
  VARIANT 2: note = Any amino acid
  VARIANT 3: note = Any amino acid
  VARIANT 4: note = Any amino acid
  VARIANT 5: note = Any amino acid
  VARIANT 6: note = Any amino acid
  VARIANT 7: note = Any amino acid
  VARIANT 8: note = Any amino acid
  VARIANT 9: note = Any amino acid
  VARIANT 10: note = Any amino acid
  VARIANT 11: note = Any amino acid
  VARIANT 12: note = Any amino acid
  VARIANT 13: note = Any amino acid
  VARIANT 14: note = Any amino acid
  VARIANT 15: note = Any amino acid
  VARIANT 16: note = Any amino acid
  VARIANT 17: note = Any amino acid
  VARIANT 18: note = Any amino acid
  VARIANT 19: note = Any amino acid
  VARIANT 20: note = Any amino acid
  VARIANT 21: note = Any amino acid
  VARIANT 22: note = Any amino acid
  VARIANT 23: note = Any amino acid
  VARIANT 24: note = Any amino acid
  VARIANT 25: note = Any amino acid
  VARIANT 26: note = Any amino acid
  VARIANT 27: note = Any amino acid
  VARIANT 28: note = Any amino acid
  VARIANT 29: note = Any amino acid
  VARIANT 30: note = Any amino acid
  VARIANT 31: note = Any amino acid
  VARIANT 32: note = Any amino acid
  VARIANT 33: note = Any amino acid
  VARIANT 34: note = Any amino acid
  VARIANT 35: note = Any amino acid
  VARIANT 36: note = Any amino acid
  VARIANT 37: note = Any amino acid
  VARIANT 38: note = Any amino acid
  VARIANT 39: note = Any amino acid
  VARIANT 40: note = Any amino acid
  VARIANT 41: note = Any amino acid
  VARIANT 42: note = Any amino acid
  VARIANT 43: note = Any amino acid
  VARIANT 44: note = Any amino acid
  VARIANT 45: note = Any amino acid
  VARIANT 46: note = Any amino acid
  VARIANT 47: note = Any amino acid
  VARIANT 48: note = Any amino acid
  VARIANT 49: note = Any amino acid
  VARIANT 51: note = Any amino acid
  VARIANT 52: note = Any amino acid
  VARIANT 53: note = Any amino acid
  VARIANT 54: note = Any amino acid
  VARIANT 55: note = Any amino acid
  VARIANT 56: note = Any amino acid
  VARIANT 57: note = Any amino acid
  VARIANT 58: note = Any amino acid
  VARIANT 59: note = Any amino acid
  VARIANT 60: note = Any amino acid
  VARIANT 61: note = Any amino acid
  VARIANT 62: note = Any amino acid
  VARIANT 63: note = Any amino acid
  VARIANT 64: note = Any amino acid
  VARIANT 65: note = Any amino acid
  VARIANT 66: note = Any amino acid
  VARIANT 67: note = Any amino acid
  VARIANT 68: note = Any amino acid
  VARIANT 69: note = Any amino acid
  VARIANT 70: note = Any amino acid
  VARIANT 71: note = Any amino acid
  VARIANT 72: note = Any amino acid
  VARIANT 73: note = Any amino acid
  VARIANT 74: note = Any amino acid
  VARIANT 75: note = Any amino acid
  VARIANT 76: note = Any amino acid
  VARIANT 77: note = Any amino acid
  VARIANT 78: note = Any amino acid
  VARIANT 79: note = Any amino acid
  VARIANT 80: note = Any amino acid
  VARIANT 81: note = Any amino acid
  VARIANT 82: note = Any amino acid
  VARIANT 83: note = Any amino acid
  VARIANT 84: note = Any amino acid
  VARIANT 85: note = Any amino acid
  VARIANT 86: note = Any amino acid
  VARIANT 88: note = Any amino acid
  VARIANT 90: note = Any amino acid
  VARIANT 91: note = Any amino acid
DXXXXXXXXXXXXXXXXXXXXXXXXXXXXXXXXXXXXXXXXXXXXXXXXVXXXXXXXXXXXXXXXXXXXXXXXXXXXXXXXXXXXXKXDXXD

SEQ ID NO: 796598 - protein, 94 aa, unidentified
  VARIANT 2: note = Any amino acid
  VARIANT 3: note = Any amino acid
  VARIANT 4: note = Any amino acid
  VARIANT 5: note = Any amino acid
  VARIANT 6: note = Any amino acid
  VARIANT 7: note = Any amino acid
  VARIANT 8: note = Any amino acid
  VARIANT 9: note = Any amino acid
  VARIANT 10: note = Any amino acid
  VARIANT 11: note = Any amino acid
  VARIANT 12: note = Any amino acid
  VARIANT 13: note = Any amino acid
  VARIANT 14: note = Any amino acid
  VARIANT 15: note = Any amino acid
  VARIANT 16: note = Any amino acid
  VARIANT 17: note = Any amino acid
  VARIANT 18: note = Any amino acid
  VARIANT 19: note = Any amino acid
  VARIANT 20: note = Any amino acid
  VARIANT 21: note = Any amino acid
  VARIANT 22: note = Any amino acid
  VARIANT 23: note = Any amino acid
  VARIANT 24: note = Any amino acid
  VARIANT 25: note = Any amino acid
  VARIANT 26: note = Any amino acid
  VARIANT 27: note = Any amino acid
  VARIANT 28: note = Any amino acid
  VARIANT 29: note = Any amino acid
  VARIANT 30: note = Any amino acid
  VARIANT 31: note = Any amino acid
  VARIANT 32: note = Any amino acid
  VARIANT 33: note = Any amino acid
  VARIANT 34: note = Any amino acid
  VARIANT 35: note = Any amino acid
  VARIANT 36: note = Any amino acid
  VARIANT 37: note = Any amino acid
  VARIANT 38: note = Any amino acid
  VARIANT 39: note = Any amino acid
  VARIANT 40: note = Any amino acid
  VARIANT 41: note = Any amino acid
  VARIANT 42: note = Any amino acid
  VARIANT 43: note = Any amino acid
  VARIANT 44: note = Any amino acid
  VARIANT 45: note = Any amino acid
  VARIANT 46: note = Any amino acid
  VARIANT 47: note = Any amino acid
  VARIANT 48: note = Any amino acid
  VARIANT 49: note = Any amino acid
  VARIANT 50: note = Any amino acid
  VARIANT 51: note = Any amino acid
  VARIANT 52: note = Any amino acid
  VARIANT 54: note = Any amino acid
  VARIANT 55: note = Any amino acid
  VARIANT 56: note = Any amino acid
  VARIANT 57: note = Any amino acid
  VARIANT 58: note = Any amino acid
  VARIANT 59: note = Any amino acid
  VARIANT 60: note = Any amino acid
  VARIANT 61: note = Any amino acid
  VARIANT 62: note = Any amino acid
  VARIANT 63: note = Any amino acid
  VARIANT 64: note = Any amino acid
  VARIANT 65: note = Any amino acid
  VARIANT 66: note = Any amino acid
  VARIANT 67: note = Any amino acid
  VARIANT 68: note = Any amino acid
  VARIANT 69: note = Any amino acid
  VARIANT 70: note = Any amino acid
  VARIANT 71: note = Any amino acid
  VARIANT 72: note = Any amino acid
  VARIANT 73: note = Any amino acid
  VARIANT 74: note = Any amino acid
  VARIANT 75: note = Any amino acid
  VARIANT 76: note = Any amino acid
  VARIANT 77: note = Any amino acid
  VARIANT 78: note = Any amino acid
  VARIANT 79: note = Any amino acid
  VARIANT 80: note = Any amino acid
  VARIANT 81: note = Any amino acid
  VARIANT 82: note = Any amino acid
  VARIANT 83: note = Any amino acid
  VARIANT 84: note = Any amino acid
  VARIANT 85: note = Any amino acid
  VARIANT 86: note = Any amino acid
  VARIANT 87: note = Any amino acid
  VARIANT 88: note = Any amino acid
  VARIANT 90: note = Any amino acid
  VARIANT 92: note = Any amino acid
  VARIANT 93: note = Any amino acid
DXXXXXXXXXXXXXXXXXXXXXXXXXXXXXXXXXXXXXXXXXXXXXXXXXXXEXXXXXXXXXXXXXXXXXXXXXXXXXXXXXXXXXXXNXDXXD

SEQ ID NO: 796599 - protein, 91 aa, unidentified
  VARIANT 2: note = Any amino acid
  VARIANT 3: note = Any amino acid
  VARIANT 4: note = Any amino acid
  VARIANT 5: note = Any amino acid
  VARIANT 6: note = Any amino acid
  VARIANT 7: note = Any amino acid
  VARIANT 8: note = Any amino acid
  VARIANT 9: note = Any amino acid
  VARIANT 10: note = Any amino acid
  VARIANT 11: note = Any amino acid
  VARIANT 12: note = Any amino acid
  VARIANT 13: note = Any amino acid
  VARIANT 14: note = Any amino acid
  VARIANT 15: note = Any amino acid
  VARIANT 16: note = Any amino acid
  VARIANT 17: note = Any amino acid
  VARIANT 18: note = Any amino acid
  VARIANT 19: note = Any amino acid
  VARIANT 20: note = Any amino acid
  VARIANT 21: note = Any amino acid
  VARIANT 22: note = Any amino acid
  VARIANT 23: note = Any amino acid
  VARIANT 24: note = Any amino acid
  VARIANT 25: note = Any amino acid
  VARIANT 26: note = Any amino acid
  VARIANT 27: note = Any amino acid
  VARIANT 28: note = Any amino acid
  VARIANT 29: note = Any amino acid
  VARIANT 30: note = Any amino acid
  VARIANT 31: note = Any amino acid
  VARIANT 32: note = Any amino acid
  VARIANT 33: note = Any amino acid
  VARIANT 34: note = Any amino acid
  VARIANT 35: note = Any amino acid
  VARIANT 36: note = Any amino acid
  VARIANT 37: note = Any amino acid
  VARIANT 38: note = Any amino acid
  VARIANT 39: note = Any amino acid
  VARIANT 40: note = Any amino acid
  VARIANT 41: note = Any amino acid
  VARIANT 42: note = Any amino acid
  VARIANT 43: note = Any amino acid
  VARIANT 44: note = Any amino acid
  VARIANT 45: note = Any amino acid
  VARIANT 46: note = Any amino acid
  VARIANT 47: note = Any amino acid
  VARIANT 48: note = Any amino acid
  VARIANT 49: note = Any amino acid
  VARIANT 50: note = Any amino acid
  VARIANT 51: note = Any amino acid
  VARIANT 52: note = Any amino acid
  VARIANT 54: note = Any amino acid
  VARIANT 55: note = Any amino acid
  VARIANT 56: note = Any amino acid
  VARIANT 57: note = Any amino acid
  VARIANT 58: note = Any amino acid
  VARIANT 59: note = Any amino acid
  VARIANT 60: note = Any amino acid
  VARIANT 61: note = Any amino acid
  VARIANT 62: note = Any amino acid
  VARIANT 63: note = Any amino acid
  VARIANT 64: note = Any amino acid
  VARIANT 65: note = Any amino acid
  VARIANT 66: note = Any amino acid
  VARIANT 67: note = Any amino acid
  VARIANT 68: note = Any amino acid
  VARIANT 69: note = Any amino acid
  VARIANT 70: note = Any amino acid
  VARIANT 71: note = Any amino acid
  VARIANT 72: note = Any amino acid
  VARIANT 73: note = Any amino acid
  VARIANT 74: note = Any amino acid
  VARIANT 75: note = Any amino acid
  VARIANT 76: note = Any amino acid
  VARIANT 77: note = Any amino acid
  VARIANT 78: note = Any amino acid
  VARIANT 79: note = Any amino acid
  VARIANT 80: note = Any amino acid
  VARIANT 81: note = Any amino acid
  VARIANT 82: note = Any amino acid
  VARIANT 83: note = Any amino acid
  VARIANT 84: note = Any amino acid
  VARIANT 85: note = Any amino acid
  VARIANT 87: note = Any amino acid
  VARIANT 89: note = Any amino acid
  VARIANT 90: note = Any amino acid
DXXXXXXXXXXXXXXXXXXXXXXXXXXXXXXXXXXXXXXXXXXXXXXXXXXXLXXXXXXXXXXXXXXXXXXXXXXXXXXXXXXXXKXDXXD

SEQ ID NO: 796600 - protein, 90 aa, unidentified
  VARIANT 2: note = Any amino acid
  VARIANT 3: note = Any amino acid
  VARIANT 4: note = Any amino acid
  VARIANT 5: note = Any amino acid
  VARIANT 6: note = Any amino acid
  VARIANT 7: note = Any amino acid
  VARIANT 8: note = Any amino acid
  VARIANT 9: note = Any amino acid
  VARIANT 10: note = Any amino acid
  VARIANT 11: note = Any amino acid
  VARIANT 12: note = Any amino acid
  VARIANT 13: note = Any amino acid
  VARIANT 14: note = Any amino acid
  VARIANT 15: note = Any amino acid
  VARIANT 16: note = Any amino acid
  VARIANT 17: note = Any amino acid
  VARIANT 18: note = Any amino acid
  VARIANT 19: note = Any amino acid
  VARIANT 20: note = Any amino acid
  VARIANT 21: note = Any amino acid
  VARIANT 22: note = Any amino acid
  VARIANT 23: note = Any amino acid
  VARIANT 24: note = Any amino acid
  VARIANT 25: note = Any amino acid
  VARIANT 26: note = Any amino acid
  VARIANT 27: note = Any amino acid
  VARIANT 28: note = Any amino acid
  VARIANT 29: note = Any amino acid
  VARIANT 30: note = Any amino acid
  VARIANT 31: note = Any amino acid
  VARIANT 32: note = Any amino acid
  VARIANT 33: note = Any amino acid
  VARIANT 34: note = Any amino acid
  VARIANT 35: note = Any amino acid
  VARIANT 36: note = Any amino acid
  VARIANT 37: note = Any amino acid
  VARIANT 38: note = Any amino acid
  VARIANT 39: note = Any amino acid
  VARIANT 40: note = Any amino acid
  VARIANT 41: note = Any amino acid
  VARIANT 42: note = Any amino acid
  VARIANT 43: note = Any amino acid
  VARIANT 44: note = Any amino acid
  VARIANT 45: note = Any amino acid
  VARIANT 46: note = Any amino acid
  VARIANT 48: note = Any amino acid
  VARIANT 49: note = Any amino acid
  VARIANT 50: note = Any amino acid
  VARIANT 51: note = Any amino acid
  VARIANT 52: note = Any amino acid
  VARIANT 53: note = Any amino acid
  VARIANT 54: note = Any amino acid
  VARIANT 55: note = Any amino acid
  VARIANT 56: note = Any amino acid
  VARIANT 57: note = Any amino acid
  VARIANT 58: note = Any amino acid
  VARIANT 59: note = Any amino acid
  VARIANT 60: note = Any amino acid
  VARIANT 61: note = Any amino acid
  VARIANT 62: note = Any amino acid
  VARIANT 63: note = Any amino acid
  VARIANT 64: note = Any amino acid
  VARIANT 65: note = Any amino acid
  VARIANT 66: note = Any amino acid
  VARIANT 67: note = Any amino acid
  VARIANT 68: note = Any amino acid
  VARIANT 69: note = Any amino acid
  VARIANT 70: note = Any amino acid
  VARIANT 71: note = Any amino acid
  VARIANT 72: note = Any amino acid
  VARIANT 73: note = Any amino acid
  VARIANT 74: note = Any amino acid
  VARIANT 75: note = Any amino acid
  VARIANT 76: note = Any amino acid
  VARIANT 77: note = Any amino acid
  VARIANT 78: note = Any amino acid
  VARIANT 79: note = Any amino acid
  VARIANT 80: note = Any amino acid
  VARIANT 81: note = Any amino acid
  VARIANT 82: note = Any amino acid
  VARIANT 83: note = Any amino acid
  VARIANT 84: note = Any amino acid
  VARIANT 86: note = Any amino acid
  VARIANT 88: note = Any amino acid
  VARIANT 89: note = Any amino acid
DXXXXXXXXXXXXXXXXXXXXXXXXXXXXXXXXXXXXXXXXXXXXXMXXXXXXXXXXXXXXXXXXXXXXXXXXXXXXXXXXXXXKXDXXD

SEQ ID NO: 796601 - protein, 89 aa, unidentified
  VARIANT 2: note = Any amino acid
  VARIANT 3: note = Any amino acid
  VARIANT 4: note = Any amino acid
  VARIANT 5: note = Any amino acid
  VARIANT 6: note = Any amino acid
  VARIANT 7: note = Any amino acid
  VARIANT 8: note = Any amino acid
  VARIANT 9: note = Any amino acid
  VARIANT 10: note = Any amino acid
  VARIANT 11: note = Any amino acid
  VARIANT 12: note = Any amino acid
  VARIANT 13: note = Any amino acid
  VARIANT 14: note = Any amino acid
  VARIANT 15: note = Any amino acid
  VARIANT 16: note = Any amino acid
  VARIANT 17: note = Any amino acid
  VARIANT 18: note = Any amino acid
  VARIANT 19: note = Any amino acid
  VARIANT 20: note = Any amino acid
  VARIANT 21: note = Any amino acid
  VARIANT 22: note = Any amino acid
  VARIANT 23: note = Any amino acid
  VARIANT 24: note = Any amino acid
  VARIANT 25: note = Any amino acid
  VARIANT 26: note = Any amino acid
  VARIANT 27: note = Any amino acid
  VARIANT 28: note = Any amino acid
  VARIANT 29: note = Any amino acid
  VARIANT 30: note = Any amino acid
  VARIANT 31: note = Any amino acid
  VARIANT 32: note = Any amino acid
  VARIANT 33: note = Any amino acid
  VARIANT 34: note = Any amino acid
  VARIANT 35: note = Any amino acid
  VARIANT 36: note = Any amino acid
  VARIANT 37: note = Any amino acid
  VARIANT 38: note = Any amino acid
  VARIANT 39: note = Any amino acid
  VARIANT 40: note = Any amino acid
  VARIANT 41: note = Any amino acid
  VARIANT 42: note = Any amino acid
  VARIANT 43: note = Any amino acid
  VARIANT 44: note = Any amino acid
  VARIANT 45: note = Any amino acid
  VARIANT 46: note = Any amino acid
  VARIANT 48: note = Any amino acid
  VARIANT 49: note = Any amino acid
  VARIANT 50: note = Any amino acid
  VARIANT 51: note = Any amino acid
  VARIANT 52: note = Any amino acid
  VARIANT 53: note = Any amino acid
  VARIANT 54: note = Any amino acid
  VARIANT 55: note = Any amino acid
  VARIANT 56: note = Any amino acid
  VARIANT 57: note = Any amino acid
  VARIANT 58: note = Any amino acid
  VARIANT 59: note = Any amino acid
  VARIANT 60: note = Any amino acid
  VARIANT 61: note = Any amino acid
  VARIANT 62: note = Any amino acid
  VARIANT 63: note = Any amino acid
  VARIANT 64: note = Any amino acid
  VARIANT 65: note = Any amino acid
  VARIANT 66: note = Any amino acid
  VARIANT 67: note = Any amino acid
  VARIANT 68: note = Any amino acid
  VARIANT 69: note = Any amino acid
  VARIANT 70: note = Any amino acid
  VARIANT 71: note = Any amino acid
  VARIANT 72: note = Any amino acid
  VARIANT 73: note = Any amino acid
  VARIANT 74: note = Any amino acid
  VARIANT 75: note = Any amino acid
  VARIANT 76: note = Any amino acid
  VARIANT 77: note = Any amino acid
  VARIANT 78: note = Any amino acid
  VARIANT 79: note = Any amino acid
  VARIANT 80: note = Any amino acid
  VARIANT 81: note = Any amino acid
  VARIANT 82: note = Any amino acid
  VARIANT 83: note = Any amino acid
  VARIANT 85: note = Any amino acid
  VARIANT 87: note = Any amino acid
  VARIANT 88: note = Any amino acid
EXXXXXXXXXXXXXXXXXXXXXXXXXXXXXXXXXXXXXXXXXXXXXYXXXXXXXXXXXXXXXXXXXXXXXXXXXXXXXXXXXXKXDXXD

SEQ ID NO: 796602 - protein, 90 aa, unidentified
  VARIANT 2: note = Any amino acid
  VARIANT 3: note = Any amino acid
  VARIANT 4: note = Any amino acid
  VARIANT 5: note = Any amino acid
  VARIANT 6: note = Any amino acid
  VARIANT 7: note = Any amino acid
  VARIANT 8: note = Any amino acid
  VARIANT 9: note = Any amino acid
  VARIANT 10: note = Any amino acid
  VARIANT 11: note = Any amino acid
  VARIANT 12: note = Any amino acid
  VARIANT 13: note = Any amino acid
  VARIANT 14: note = Any amino acid
  VARIANT 15: note = Any amino acid
  VARIANT 16: note = Any amino acid
  VARIANT 17: note = Any amino acid
  VARIANT 18: note = Any amino acid
  VARIANT 19: note = Any amino acid
  VARIANT 20: note = Any amino acid
  VARIANT 21: note = Any amino acid
  VARIANT 22: note = Any amino acid
  VARIANT 23: note = Any amino acid
  VARIANT 24: note = Any amino acid
  VARIANT 25: note = Any amino acid
  VARIANT 26: note = Any amino acid
  VARIANT 27: note = Any amino acid
  VARIANT 28: note = Any amino acid
  VARIANT 29: note = Any amino acid
  VARIANT 30: note = Any amino acid
  VARIANT 31: note = Any amino acid
  VARIANT 32: note = Any amino acid
  VARIANT 33: note = Any amino acid
  VARIANT 34: note = Any amino acid
  VARIANT 35: note = Any amino acid
  VARIANT 36: note = Any amino acid
  VARIANT 37: note = Any amino acid
  VARIANT 38: note = Any amino acid
  VARIANT 39: note = Any amino acid
  VARIANT 40: note = Any amino acid
  VARIANT 41: note = Any amino acid
  VARIANT 42: note = Any amino acid
  VARIANT 43: note = Any amino acid
  VARIANT 44: note = Any amino acid
  VARIANT 45: note = Any amino acid
  VARIANT 47: note = Any amino acid
  VARIANT 48: note = Any amino acid
  VARIANT 49: note = Any amino acid
  VARIANT 50: note = Any amino acid
  VARIANT 51: note = Any amino acid
  VARIANT 52: note = Any amino acid
  VARIANT 53: note = Any amino acid
  VARIANT 54: note = Any amino acid
  VARIANT 55: note = Any amino acid
  VARIANT 56: note = Any amino acid
  VARIANT 57: note = Any amino acid
  VARIANT 58: note = Any amino acid
  VARIANT 59: note = Any amino acid
  VARIANT 60: note = Any amino acid
  VARIANT 61: note = Any amino acid
  VARIANT 62: note = Any amino acid
  VARIANT 63: note = Any amino acid
  VARIANT 64: note = Any amino acid
  VARIANT 65: note = Any amino acid
  VARIANT 66: note = Any amino acid
  VARIANT 67: note = Any amino acid
  VARIANT 68: note = Any amino acid
  VARIANT 69: note = Any amino acid
  VARIANT 70: note = Any amino acid
  VARIANT 71: note = Any amino acid
  VARIANT 72: note = Any amino acid
  VARIANT 73: note = Any amino acid
  VARIANT 74: note = Any amino acid
  VARIANT 75: note = Any amino acid
  VARIANT 76: note = Any amino acid
  VARIANT 77: note = Any amino acid
  VARIANT 78: note = Any amino acid
  VARIANT 79: note = Any amino acid
  VARIANT 80: note = Any amino acid
  VARIANT 81: note = Any amino acid
  VARIANT 82: note = Any amino acid
  VARIANT 83: note = Any amino acid
  VARIANT 84: note = Any amino acid
  VARIANT 86: note = Any amino acid
  VARIANT 88: note = Any amino acid
  VARIANT 89: note = Any amino acid
DXXXXXXXXXXXXXXXXXXXXXXXXXXXXXXXXXXXXXXXXXXXXVXXXXXXXXXXXXXXXXXXXXXXXXXXXXXXXXXXXXXXKXDXXD

SEQ ID NO: 796603 - protein, 89 aa, unidentified
  VARIANT 2: note = Any amino acid
  VARIANT 3: note = Any amino acid
  VARIANT 4: note = Any amino acid
  VARIANT 5: note = Any amino acid
  VARIANT 6: note = Any amino acid
  VARIANT 7: note = Any amino acid
  VARIANT 8: note = Any amino acid
  VARIANT 9: note = Any amino acid
  VARIANT 10: note = Any amino acid
  VARIANT 11: note = Any amino acid
  VARIANT 12: note = Any amino acid
  VARIANT 13: note = Any amino acid
  VARIANT 14: note = Any amino acid
  VARIANT 15: note = Any amino acid
  VARIANT 16: note = Any amino acid
  VARIANT 17: note = Any amino acid
  VARIANT 18: note = Any amino acid
  VARIANT 19: note = Any amino acid
  VARIANT 20: note = Any amino acid
  VARIANT 21: note = Any amino acid
  VARIANT 22: note = Any amino acid
  VARIANT 23: note = Any amino acid
  VARIANT 24: note = Any amino acid
  VARIANT 25: note = Any amino acid
  VARIANT 26: note = Any amino acid
  VARIANT 27: note = Any amino acid
  VARIANT 28: note = Any amino acid
  VARIANT 29: note = Any amino acid
  VARIANT 30: note = Any amino acid
  VARIANT 31: note = Any amino acid
  VARIANT 32: note = Any amino acid
  VARIANT 33: note = Any amino acid
  VARIANT 34: note = Any amino acid
  VARIANT 35: note = Any amino acid
  VARIANT 36: note = Any amino acid
  VARIANT 37: note = Any amino acid
  VARIANT 38: note = Any amino acid
  VARIANT 39: note = Any amino acid
  VARIANT 40: note = Any amino acid
  VARIANT 41: note = Any amino acid
  VARIANT 42: note = Any amino acid
  VARIANT 43: note = Any amino acid
  VARIANT 44: note = Any amino acid
  VARIANT 45: note = Any amino acid
  VARIANT 46: note = Any amino acid
  VARIANT 48: note = Any amino acid
  VARIANT 49: note = Any amino acid
  VARIANT 50: note = Any amino acid
  VARIANT 51: note = Any amino acid
  VARIANT 52: note = Any amino acid
  VARIANT 53: note = Any amino acid
  VARIANT 54: note = Any amino acid
  VARIANT 55: note = Any amino acid
  VARIANT 56: note = Any amino acid
  VARIANT 57: note = Any amino acid
  VARIANT 58: note = Any amino acid
  VARIANT 59: note = Any amino acid
  VARIANT 60: note = Any amino acid
  VARIANT 61: note = Any amino acid
  VARIANT 62: note = Any amino acid
  VARIANT 63: note = Any amino acid
  VARIANT 64: note = Any amino acid
  VARIANT 65: note = Any amino acid
  VARIANT 66: note = Any amino acid
  VARIANT 67: note = Any amino acid
  VARIANT 68: note = Any amino acid
  VARIANT 69: note = Any amino acid
  VARIANT 70: note = Any amino acid
  VARIANT 71: note = Any amino acid
  VARIANT 72: note = Any amino acid
  VARIANT 73: note = Any amino acid
  VARIANT 74: note = Any amino acid
  VARIANT 75: note = Any amino acid
  VARIANT 76: note = Any amino acid
  VARIANT 77: note = Any amino acid
  VARIANT 78: note = Any amino acid
  VARIANT 79: note = Any amino acid
  VARIANT 80: note = Any amino acid
  VARIANT 81: note = Any amino acid
  VARIANT 82: note = Any amino acid
  VARIANT 83: note = Any amino acid
  VARIANT 85: note = Any amino acid
  VARIANT 87: note = Any amino acid
  VARIANT 88: note = Any amino acid
DXXXXXXXXXXXXXXXXXXXXXXXXXXXXXXXXXXXXXXXXXXXXXAXXXXXXXXXXXXXXXXXXXXXXXXXXXXXXXXXXXXKXDXXD

SEQ ID NO: 796604 - protein, 88 aa, unidentified
  VARIANT 2: note = Any amino acid
  VARIANT 3: note = Any amino acid
  VARIANT 4: note = Any amino acid
  VARIANT 5: note = Any amino acid
  VARIANT 6: note = Any amino acid
  VARIANT 7: note = Any amino acid
  VARIANT 8: note = Any amino acid
  VARIANT 9: note = Any amino acid
  VARIANT 10: note = Any amino acid
  VARIANT 11: note = Any amino acid
  VARIANT 12: note = Any amino acid
  VARIANT 13: note = Any amino acid
  VARIANT 14: note = Any amino acid
  VARIANT 15: note = Any amino acid
  VARIANT 16: note = Any amino acid
  VARIANT 17: note = Any amino acid
  VARIANT 18: note = Any amino acid
  VARIANT 19: note = Any amino acid
  VARIANT 20: note = Any amino acid
  VARIANT 21: note = Any amino acid
  VARIANT 22: note = Any amino acid
  VARIANT 23: note = Any amino acid
  VARIANT 24: note = Any amino acid
  VARIANT 25: note = Any amino acid
  VARIANT 26: note = Any amino acid
  VARIANT 27: note = Any amino acid
  VARIANT 28: note = Any amino acid
  VARIANT 29: note = Any amino acid
  VARIANT 30: note = Any amino acid
  VARIANT 31: note = Any amino acid
  VARIANT 32: note = Any amino acid
  VARIANT 33: note = Any amino acid
  VARIANT 34: note = Any amino acid
  VARIANT 35: note = Any amino acid
  VARIANT 36: note = Any amino acid
  VARIANT 37: note = Any amino acid
  VARIANT 38: note = Any amino acid
  VARIANT 39: note = Any amino acid
  VARIANT 40: note = Any amino acid
  VARIANT 41: note = Any amino acid
  VARIANT 42: note = Any amino acid
  VARIANT 43: note = Any amino acid
  VARIANT 44: note = Any amino acid
  VARIANT 45: note = Any amino acid
  VARIANT 46: note = Any amino acid
  VARIANT 48: note = Any amino acid
  VARIANT 49: note = Any amino acid
  VARIANT 50: note = Any amino acid
  VARIANT 51: note = Any amino acid
  VARIANT 52: note = Any amino acid
  VARIANT 53: note = Any amino acid
  VARIANT 54: note = Any amino acid
  VARIANT 55: note = Any amino acid
  VARIANT 56: note = Any amino acid
  VARIANT 57: note = Any amino acid
  VARIANT 58: note = Any amino acid
  VARIANT 59: note = Any amino acid
  VARIANT 60: note = Any amino acid
  VARIANT 61: note = Any amino acid
  VARIANT 62: note = Any amino acid
  VARIANT 63: note = Any amino acid
  VARIANT 64: note = Any amino acid
  VARIANT 65: note = Any amino acid
  VARIANT 66: note = Any amino acid
  VARIANT 67: note = Any amino acid
  VARIANT 68: note = Any amino acid
  VARIANT 69: note = Any amino acid
  VARIANT 70: note = Any amino acid
  VARIANT 71: note = Any amino acid
  VARIANT 72: note = Any amino acid
  VARIANT 73: note = Any amino acid
  VARIANT 74: note = Any amino acid
  VARIANT 75: note = Any amino acid
  VARIANT 76: note = Any amino acid
  VARIANT 77: note = Any amino acid
  VARIANT 78: note = Any amino acid
  VARIANT 79: note = Any amino acid
  VARIANT 80: note = Any amino acid
  VARIANT 81: note = Any amino acid
  VARIANT 82: note = Any amino acid
  VARIANT 84: note = Any amino acid
  VARIANT 86: note = Any amino acid
  VARIANT 87: note = Any amino acid
DXXXXXXXXXXXXXXXXXXXXXXXXXXXXXXXXXXXXXXXXXXXXXEXXXXXXXXXXXXXXXXXXXXXXXXXXXXXXXXXXXQXDXXD

SEQ ID NO: 796605 - protein, 92 aa, unidentified
  VARIANT 2: note = Any amino acid
  VARIANT 3: note = Any amino acid
  VARIANT 4: note = Any amino acid
  VARIANT 5: note = Any amino acid
  VARIANT 6: note = Any amino acid
  VARIANT 7: note = Any amino acid
  VARIANT 8: note = Any amino acid
  VARIANT 9: note = Any amino acid
  VARIANT 10: note = Any amino acid
  VARIANT 11: note = Any amino acid
  VARIANT 12: note = Any amino acid
  VARIANT 13: note = Any amino acid
  VARIANT 14: note = Any amino acid
  VARIANT 15: note = Any amino acid
  VARIANT 16: note = Any amino acid
  VARIANT 17: note = Any amino acid
  VARIANT 18: note = Any amino acid
  VARIANT 19: note = Any amino acid
  VARIANT 20: note = Any amino acid
  VARIANT 21: note = Any amino acid
  VARIANT 22: note = Any amino acid
  VARIANT 23: note = Any amino acid
  VARIANT 24: note = Any amino acid
  VARIANT 25: note = Any amino acid
  VARIANT 26: note = Any amino acid
  VARIANT 27: note = Any amino acid
  VARIANT 28: note = Any amino acid
  VARIANT 29: note = Any amino acid
  VARIANT 30: note = Any amino acid
  VARIANT 31: note = Any amino acid
  VARIANT 32: note = Any amino acid
  VARIANT 33: note = Any amino acid
  VARIANT 34: note = Any amino acid
  VARIANT 35: note = Any amino acid
  VARIANT 36: note = Any amino acid
  VARIANT 37: note = Any amino acid
  VARIANT 38: note = Any amino acid
  VARIANT 39: note = Any amino acid
  VARIANT 40: note = Any amino acid
  VARIANT 41: note = Any amino acid
  VARIANT 42: note = Any amino acid
  VARIANT 43: note = Any amino acid
  VARIANT 44: note = Any amino acid
  VARIANT 45: note = Any amino acid
  VARIANT 46: note = Any amino acid
  VARIANT 47: note = Any amino acid
  VARIANT 48: note = Any amino acid
  VARIANT 49: note = Any amino acid
  VARIANT 50: note = Any amino acid
  VARIANT 52: note = Any amino acid
  VARIANT 53: note = Any amino acid
  VARIANT 54: note = Any amino acid
  VARIANT 55: note = Any amino acid
  VARIANT 56: note = Any amino acid
  VARIANT 57: note = Any amino acid
  VARIANT 58: note = Any amino acid
  VARIANT 59: note = Any amino acid
  VARIANT 60: note = Any amino acid
  VARIANT 61: note = Any amino acid
  VARIANT 62: note = Any amino acid
  VARIANT 63: note = Any amino acid
  VARIANT 64: note = Any amino acid
  VARIANT 65: note = Any amino acid
  VARIANT 66: note = Any amino acid
  VARIANT 67: note = Any amino acid
  VARIANT 68: note = Any amino acid
  VARIANT 69: note = Any amino acid
  VARIANT 70: note = Any amino acid
  VARIANT 71: note = Any amino acid
  VARIANT 72: note = Any amino acid
  VARIANT 73: note = Any amino acid
  VARIANT 74: note = Any amino acid
  VARIANT 75: note = Any amino acid
  VARIANT 76: note = Any amino acid
  VARIANT 77: note = Any amino acid
  VARIANT 78: note = Any amino acid
  VARIANT 79: note = Any amino acid
  VARIANT 80: note = Any amino acid
  VARIANT 81: note = Any amino acid
  VARIANT 82: note = Any amino acid
  VARIANT 83: note = Any amino acid
  VARIANT 84: note = Any amino acid
  VARIANT 85: note = Any amino acid
  VARIANT 86: note = Any amino acid
  VARIANT 88: note = Any amino acid
  VARIANT 90: note = Any amino acid
  VARIANT 91: note = Any amino acid
DXXXXXXXXXXXXXXXXXXXXXXXXXXXXXXXXXXXXXXXXXXXXXXXXXEXXXXXXXXXXXXXXXXXXXXXXXXXXXXXXXXXXXNXDXXS

SEQ ID NO: 796606 - protein, 87 aa, unidentified
  VARIANT 2: note = Any amino acid
  VARIANT 3: note = Any amino acid
  VARIANT 4: note = Any amino acid
  VARIANT 5: note = Any amino acid
  VARIANT 6: note = Any amino acid
  VARIANT 7: note = Any amino acid
  VARIANT 8: note = Any amino acid
  VARIANT 9: note = Any amino acid
  VARIANT 10: note = Any amino acid
  VARIANT 11: note = Any amino acid
  VARIANT 12: note = Any amino acid
  VARIANT 13: note = Any amino acid
  VARIANT 14: note = Any amino acid
  VARIANT 15: note = Any amino acid
  VARIANT 16: note = Any amino acid
  VARIANT 17: note = Any amino acid
  VARIANT 18: note = Any amino acid
  VARIANT 19: note = Any amino acid
  VARIANT 20: note = Any amino acid
  VARIANT 21: note = Any amino acid
  VARIANT 22: note = Any amino acid
  VARIANT 23: note = Any amino acid
  VARIANT 24: note = Any amino acid
  VARIANT 25: note = Any amino acid
  VARIANT 26: note = Any amino acid
  VARIANT 27: note = Any amino acid
  VARIANT 28: note = Any amino acid
  VARIANT 29: note = Any amino acid
  VARIANT 30: note = Any amino acid
  VARIANT 31: note = Any amino acid
  VARIANT 32: note = Any amino acid
  VARIANT 33: note = Any amino acid
  VARIANT 34: note = Any amino acid
  VARIANT 35: note = Any amino acid
  VARIANT 36: note = Any amino acid
  VARIANT 37: note = Any amino acid
  VARIANT 38: note = Any amino acid
  VARIANT 39: note = Any amino acid
  VARIANT 40: note = Any amino acid
  VARIANT 41: note = Any amino acid
  VARIANT 42: note = Any amino acid
  VARIANT 43: note = Any amino acid
  VARIANT 44: note = Any amino acid
  VARIANT 45: note = Any amino acid
  VARIANT 46: note = Any amino acid
  VARIANT 48: note = Any amino acid
  VARIANT 49: note = Any amino acid
  VARIANT 50: note = Any amino acid
  VARIANT 51: note = Any amino acid
  VARIANT 52: note = Any amino acid
  VARIANT 53: note = Any amino acid
  VARIANT 54: note = Any amino acid
  VARIANT 55: note = Any amino acid
  VARIANT 56: note = Any amino acid
  VARIANT 57: note = Any amino acid
  VARIANT 58: note = Any amino acid
  VARIANT 59: note = Any amino acid
  VARIANT 60: note = Any amino acid
  VARIANT 61: note = Any amino acid
  VARIANT 62: note = Any amino acid
  VARIANT 63: note = Any amino acid
  VARIANT 64: note = Any amino acid
  VARIANT 65: note = Any amino acid
  VARIANT 66: note = Any amino acid
  VARIANT 67: note = Any amino acid
  VARIANT 68: note = Any amino acid
  VARIANT 69: note = Any amino acid
  VARIANT 70: note = Any amino acid
  VARIANT 71: note = Any amino acid
  VARIANT 72: note = Any amino acid
  VARIANT 73: note = Any amino acid
  VARIANT 74: note = Any amino acid
  VARIANT 75: note = Any amino acid
  VARIANT 76: note = Any amino acid
  VARIANT 77: note = Any amino acid
  VARIANT 78: note = Any amino acid
  VARIANT 79: note = Any amino acid
  VARIANT 80: note = Any amino acid
  VARIANT 81: note = Any amino acid
  VARIANT 83: note = Any amino acid
  VARIANT 85: note = Any amino acid
  VARIANT 86: note = Any amino acid
DXXXXXXXXXXXXXXXXXXXXXXXXXXXXXXXXXXXXXXXXXXXXXEXXXXXXXXXXXXXXXXXXXXXXXXXXXXXXXXXXHXDXXD

SEQ ID NO: 796607 - protein, 97 aa, unidentified
  VARIANT 2: note = Any amino acid
  VARIANT 3: note = Any amino acid
  VARIANT 4: note = Any amino acid
  VARIANT 5: note = Any amino acid
  VARIANT 6: note = Any amino acid
  VARIANT 7: note = Any amino acid
  VARIANT 8: note = Any amino acid
  VARIANT 9: note = Any amino acid
  VARIANT 10: note = Any amino acid
  VARIANT 11: note = Any amino acid
  VARIANT 12: note = Any amino acid
  VARIANT 13: note = Any amino acid
  VARIANT 14: note = Any amino acid
  VARIANT 15: note = Any amino acid
  VARIANT 16: note = Any amino acid
  VARIANT 17: note = Any amino acid
  VARIANT 18: note = Any amino acid
  VARIANT 19: note = Any amino acid
  VARIANT 20: note = Any amino acid
  VARIANT 21: note = Any amino acid
  VARIANT 22: note = Any amino acid
  VARIANT 23: note = Any amino acid
  VARIANT 24: note = Any amino acid
  VARIANT 25: note = Any amino acid
  VARIANT 26: note = Any amino acid
  VARIANT 27: note = Any amino acid
  VARIANT 28: note = Any amino acid
  VARIANT 29: note = Any amino acid
  VARIANT 30: note = Any amino acid
  VARIANT 31: note = Any amino acid
  VARIANT 32: note = Any amino acid
  VARIANT 33: note = Any amino acid
  VARIANT 34: note = Any amino acid
  VARIANT 35: note = Any amino acid
  VARIANT 36: note = Any amino acid
  VARIANT 37: note = Any amino acid
  VARIANT 38: note = Any amino acid
  VARIANT 39: note = Any amino acid
  VARIANT 40: note = Any amino acid
  VARIANT 41: note = Any amino acid
  VARIANT 42: note = Any amino acid
  VARIANT 43: note = Any amino acid
  VARIANT 44: note = Any amino acid
  VARIANT 45: note = Any amino acid
  VARIANT 46: note = Any amino acid
  VARIANT 47: note = Any amino acid
  VARIANT 48: note = Any amino acid
  VARIANT 49: note = Any amino acid
  VARIANT 50: note = Any amino acid
  VARIANT 51: note = Any amino acid
  VARIANT 52: note = Any amino acid
  VARIANT 54: note = Any amino acid
  VARIANT 55: note = Any amino acid
  VARIANT 56: note = Any amino acid
  VARIANT 57: note = Any amino acid
  VARIANT 58: note = Any amino acid
  VARIANT 59: note = Any amino acid
  VARIANT 60: note = Any amino acid
  VARIANT 61: note = Any amino acid
  VARIANT 62: note = Any amino acid
  VARIANT 63: note = Any amino acid
  VARIANT 64: note = Any amino acid
  VARIANT 65: note = Any amino acid
  VARIANT 66: note = Any amino acid
  VARIANT 67: note = Any amino acid
  VARIANT 68: note = Any amino acid
  VARIANT 69: note = Any amino acid
  VARIANT 70: note = Any amino acid
  VARIANT 71: note = Any amino acid
  VARIANT 72: note = Any amino acid
  VARIANT 73: note = Any amino acid
  VARIANT 74: note = Any amino acid
  VARIANT 75: note = Any amino acid
  VARIANT 76: note = Any amino acid
  VARIANT 77: note = Any amino acid
  VARIANT 78: note = Any amino acid
  VARIANT 79: note = Any amino acid
  VARIANT 80: note = Any amino acid
  VARIANT 81: note = Any amino acid
  VARIANT 82: note = Any amino acid
  VARIANT 83: note = Any amino acid
  VARIANT 84: note = Any amino acid
  VARIANT 85: note = Any amino acid
  VARIANT 86: note = Any amino acid
  VARIANT 87: note = Any amino acid
  VARIANT 88: note = Any amino acid
  VARIANT 89: note = Any amino acid
  VARIANT 90: note = Any amino acid
  VARIANT 91: note = Any amino acid
  VARIANT 93: note = Any amino acid
  VARIANT 95: note = Any amino acid
  VARIANT 96: note = Any amino acid
DXXXXXXXXXXXXXXXXXXXXXXXXXXXXXXXXXXXXXXXXXXXXXXXXXXXGXXXXXXXXXXXXXXXXXXXXXXXXXXXXXXXXXXXXXXKXDXXD

SEQ ID NO: 796608 - protein, 87 aa, unidentified
  VARIANT 2: note = Any amino acid
  VARIANT 3: note = Any amino acid
  VARIANT 4: note = Any amino acid
  VARIANT 5: note = Any amino acid
  VARIANT 6: note = Any amino acid
  VARIANT 7: note = Any amino acid
  VARIANT 8: note = Any amino acid
  VARIANT 9: note = Any amino acid
  VARIANT 10: note = Any amino acid
  VARIANT 11: note = Any amino acid
  VARIANT 12: note = Any amino acid
  VARIANT 13: note = Any amino acid
  VARIANT 14: note = Any amino acid
  VARIANT 15: note = Any amino acid
  VARIANT 16: note = Any amino acid
  VARIANT 17: note = Any amino acid
  VARIANT 18: note = Any amino acid
  VARIANT 19: note = Any amino acid
  VARIANT 20: note = Any amino acid
  VARIANT 21: note = Any amino acid
  VARIANT 22: note = Any amino acid
  VARIANT 23: note = Any amino acid
  VARIANT 24: note = Any amino acid
  VARIANT 25: note = Any amino acid
  VARIANT 26: note = Any amino acid
  VARIANT 27: note = Any amino acid
  VARIANT 28: note = Any amino acid
  VARIANT 29: note = Any amino acid
  VARIANT 30: note = Any amino acid
  VARIANT 31: note = Any amino acid
  VARIANT 32: note = Any amino acid
  VARIANT 33: note = Any amino acid
  VARIANT 34: note = Any amino acid
  VARIANT 35: note = Any amino acid
  VARIANT 36: note = Any amino acid
  VARIANT 37: note = Any amino acid
  VARIANT 38: note = Any amino acid
  VARIANT 39: note = Any amino acid
  VARIANT 40: note = Any amino acid
  VARIANT 41: note = Any amino acid
  VARIANT 42: note = Any amino acid
  VARIANT 43: note = Any amino acid
  VARIANT 44: note = Any amino acid
  VARIANT 45: note = Any amino acid
  VARIANT 47: note = Any amino acid
  VARIANT 48: note = Any amino acid
  VARIANT 49: note = Any amino acid
  VARIANT 50: note = Any amino acid
  VARIANT 51: note = Any amino acid
  VARIANT 52: note = Any amino acid
  VARIANT 53: note = Any amino acid
  VARIANT 54: note = Any amino acid
  VARIANT 55: note = Any amino acid
  VARIANT 56: note = Any amino acid
  VARIANT 57: note = Any amino acid
  VARIANT 58: note = Any amino acid
  VARIANT 59: note = Any amino acid
  VARIANT 60: note = Any amino acid
  VARIANT 61: note = Any amino acid
  VARIANT 62: note = Any amino acid
  VARIANT 63: note = Any amino acid
  VARIANT 64: note = Any amino acid
  VARIANT 65: note = Any amino acid
  VARIANT 66: note = Any amino acid
  VARIANT 67: note = Any amino acid
  VARIANT 68: note = Any amino acid
  VARIANT 69: note = Any amino acid
  VARIANT 70: note = Any amino acid
  VARIANT 71: note = Any amino acid
  VARIANT 72: note = Any amino acid
  VARIANT 73: note = Any amino acid
  VARIANT 74: note = Any amino acid
  VARIANT 75: note = Any amino acid
  VARIANT 76: note = Any amino acid
  VARIANT 77: note = Any amino acid
  VARIANT 78: note = Any amino acid
  VARIANT 79: note = Any amino acid
  VARIANT 80: note = Any amino acid
  VARIANT 81: note = Any amino acid
  VARIANT 83: note = Any amino acid
  VARIANT 85: note = Any amino acid
  VARIANT 86: note = Any amino acid
DXXXXXXXXXXXXXXXXXXXXXXXXXXXXXXXXXXXXXXXXXXXXEXXXXXXXXXXXXXXXXXXXXXXXXXXXXXXXXXXXKXNXXD

SEQ ID NO: 796609 - protein, 96 aa, unidentified
  VARIANT 2: note = Any amino acid
  VARIANT 3: note = Any amino acid
  VARIANT 4: note = Any amino acid
  VARIANT 5: note = Any amino acid
  VARIANT 6: note = Any amino acid
  VARIANT 7: note = Any amino acid
  VARIANT 8: note = Any amino acid
  VARIANT 9: note = Any amino acid
  VARIANT 10: note = Any amino acid
  VARIANT 11: note = Any amino acid
  VARIANT 12: note = Any amino acid
  VARIANT 13: note = Any amino acid
  VARIANT 14: note = Any amino acid
  VARIANT 15: note = Any amino acid
  VARIANT 16: note = Any amino acid
  VARIANT 17: note = Any amino acid
  VARIANT 18: note = Any amino acid
  VARIANT 19: note = Any amino acid
  VARIANT 20: note = Any amino acid
  VARIANT 21: note = Any amino acid
  VARIANT 22: note = Any amino acid
  VARIANT 23: note = Any amino acid
  VARIANT 24: note = Any amino acid
  VARIANT 25: note = Any amino acid
  VARIANT 26: note = Any amino acid
  VARIANT 27: note = Any amino acid
  VARIANT 28: note = Any amino acid
  VARIANT 29: note = Any amino acid
  VARIANT 30: note = Any amino acid
  VARIANT 31: note = Any amino acid
  VARIANT 32: note = Any amino acid
  VARIANT 33: note = Any amino acid
  VARIANT 34: note = Any amino acid
  VARIANT 35: note = Any amino acid
  VARIANT 36: note = Any amino acid
  VARIANT 37: note = Any amino acid
  VARIANT 38: note = Any amino acid
  VARIANT 39: note = Any amino acid
  VARIANT 40: note = Any amino acid
  VARIANT 41: note = Any amino acid
  VARIANT 42: note = Any amino acid
  VARIANT 43: note = Any amino acid
  VARIANT 44: note = Any amino acid
  VARIANT 45: note = Any amino acid
  VARIANT 46: note = Any amino acid
  VARIANT 47: note = Any amino acid
  VARIANT 48: note = Any amino acid
  VARIANT 49: note = Any amino acid
  VARIANT 50: note = Any amino acid
  VARIANT 51: note = Any amino acid
  VARIANT 52: note = Any amino acid
  VARIANT 53: note = Any amino acid
  VARIANT 55: note = Any amino acid
  VARIANT 56: note = Any amino acid
  VARIANT 57: note = Any amino acid
  VARIANT 58: note = Any amino acid
  VARIANT 59: note = Any amino acid
  VARIANT 60: note = Any amino acid
  VARIANT 61: note = Any amino acid
  VARIANT 62: note = Any amino acid
  VARIANT 63: note = Any amino acid
  VARIANT 64: note = Any amino acid
  VARIANT 65: note = Any amino acid
  VARIANT 66: note = Any amino acid
  VARIANT 67: note = Any amino acid
  VARIANT 68: note = Any amino acid
  VARIANT 69: note = Any amino acid
  VARIANT 70: note = Any amino acid
  VARIANT 71: note = Any amino acid
  VARIANT 72: note = Any amino acid
  VARIANT 73: note = Any amino acid
  VARIANT 74: note = Any amino acid
  VARIANT 75: note = Any amino acid
  VARIANT 76: note = Any amino acid
  VARIANT 77: note = Any amino acid
  VARIANT 78: note = Any amino acid
  VARIANT 79: note = Any amino acid
  VARIANT 80: note = Any amino acid
  VARIANT 81: note = Any amino acid
  VARIANT 82: note = Any amino acid
  VARIANT 83: note = Any amino acid
  VARIANT 84: note = Any amino acid
  VARIANT 85: note = Any amino acid
  VARIANT 86: note = Any amino acid
  VARIANT 87: note = Any amino acid
  VARIANT 88: note = Any amino acid
  VARIANT 89: note = Any amino acid
  VARIANT 90: note = Any amino acid
  VARIANT 92: note = Any amino acid
  VARIANT 94: note = Any amino acid
  VARIANT 95: note = Any amino acid
DXXXXXXXXXXXXXXXXXXXXXXXXXXXXXXXXXXXXXXXXXXXXXXXXXXXXYXXXXXXXXXXXXXXXXXXXXXXXXXXXXXXXXXXXXKXDXXD

SEQ ID NO: 796610 - protein, 85 aa, unidentified
  VARIANT 2: note = Any amino acid
  VARIANT 3: note = Any amino acid
  VARIANT 4: note = Any amino acid
  VARIANT 5: note = Any amino acid
  VARIANT 6: note = Any amino acid
  VARIANT 7: note = Any amino acid
  VARIANT 8: note = Any amino acid
  VARIANT 9: note = Any amino acid
  VARIANT 10: note = Any amino acid
  VARIANT 11: note = Any amino acid
  VARIANT 12: note = Any amino acid
  VARIANT 13: note = Any amino acid
  VARIANT 14: note = Any amino acid
  VARIANT 15: note = Any amino acid
  VARIANT 16: note = Any amino acid
  VARIANT 17: note = Any amino acid
  VARIANT 18: note = Any amino acid
  VARIANT 19: note = Any amino acid
  VARIANT 20: note = Any amino acid
  VARIANT 21: note = Any amino acid
  VARIANT 22: note = Any amino acid
  VARIANT 23: note = Any amino acid
  VARIANT 24: note = Any amino acid
  VARIANT 25: note = Any amino acid
  VARIANT 26: note = Any amino acid
  VARIANT 27: note = Any amino acid
  VARIANT 28: note = Any amino acid
  VARIANT 29: note = Any amino acid
  VARIANT 30: note = Any amino acid
  VARIANT 31: note = Any amino acid
  VARIANT 32: note = Any amino acid
  VARIANT 33: note = Any amino acid
  VARIANT 34: note = Any amino acid
  VARIANT 35: note = Any amino acid
  VARIANT 36: note = Any amino acid
  VARIANT 37: note = Any amino acid
  VARIANT 38: note = Any amino acid
  VARIANT 39: note = Any amino acid
  VARIANT 40: note = Any amino acid
  VARIANT 41: note = Any amino acid
  VARIANT 42: note = Any amino acid
  VARIANT 43: note = Any amino acid
  VARIANT 44: note = Any amino acid
  VARIANT 45: note = Any amino acid
  VARIANT 47: note = Any amino acid
  VARIANT 48: note = Any amino acid
  VARIANT 49: note = Any amino acid
  VARIANT 50: note = Any amino acid
  VARIANT 51: note = Any amino acid
  VARIANT 52: note = Any amino acid
  VARIANT 53: note = Any amino acid
  VARIANT 54: note = Any amino acid
  VARIANT 55: note = Any amino acid
  VARIANT 56: note = Any amino acid
  VARIANT 57: note = Any amino acid
  VARIANT 58: note = Any amino acid
  VARIANT 59: note = Any amino acid
  VARIANT 60: note = Any amino acid
  VARIANT 61: note = Any amino acid
  VARIANT 62: note = Any amino acid
  VARIANT 63: note = Any amino acid
  VARIANT 64: note = Any amino acid
  VARIANT 65: note = Any amino acid
  VARIANT 66: note = Any amino acid
  VARIANT 67: note = Any amino acid
  VARIANT 68: note = Any amino acid
  VARIANT 69: note = Any amino acid
  VARIANT 70: note = Any amino acid
  VARIANT 71: note = Any amino acid
  VARIANT 72: note = Any amino acid
  VARIANT 73: note = Any amino acid
  VARIANT 74: note = Any amino acid
  VARIANT 75: note = Any amino acid
  VARIANT 76: note = Any amino acid
  VARIANT 77: note = Any amino acid
  VARIANT 78: note = Any amino acid
  VARIANT 79: note = Any amino acid
  VARIANT 81: note = Any amino acid
  VARIANT 83: note = Any amino acid
  VARIANT 84: note = Any amino acid
DXXXXXXXXXXXXXXXXXXXXXXXXXXXXXXXXXXXXXXXXXXXXFXXXXXXXXXXXXXXXXXXXXXXXXXXXXXXXXXKXDXXD

SEQ ID NO: 796611 - protein, 89 aa, unidentified
  VARIANT 2: note = Any amino acid
  VARIANT 3: note = Any amino acid
  VARIANT 4: note = Any amino acid
  VARIANT 5: note = Any amino acid
  VARIANT 6: note = Any amino acid
  VARIANT 7: note = Any amino acid
  VARIANT 8: note = Any amino acid
  VARIANT 9: note = Any amino acid
  VARIANT 10: note = Any amino acid
  VARIANT 11: note = Any amino acid
  VARIANT 12: note = Any amino acid
  VARIANT 13: note = Any amino acid
  VARIANT 14: note = Any amino acid
  VARIANT 15: note = Any amino acid
  VARIANT 16: note = Any amino acid
  VARIANT 17: note = Any amino acid
  VARIANT 18: note = Any amino acid
  VARIANT 19: note = Any amino acid
  VARIANT 20: note = Any amino acid
  VARIANT 21: note = Any amino acid
  VARIANT 22: note = Any amino acid
  VARIANT 23: note = Any amino acid
  VARIANT 24: note = Any amino acid
  VARIANT 25: note = Any amino acid
  VARIANT 26: note = Any amino acid
  VARIANT 27: note = Any amino acid
  VARIANT 28: note = Any amino acid
  VARIANT 29: note = Any amino acid
  VARIANT 30: note = Any amino acid
  VARIANT 31: note = Any amino acid
  VARIANT 32: note = Any amino acid
  VARIANT 33: note = Any amino acid
  VARIANT 34: note = Any amino acid
  VARIANT 35: note = Any amino acid
  VARIANT 36: note = Any amino acid
  VARIANT 37: note = Any amino acid
  VARIANT 38: note = Any amino acid
  VARIANT 39: note = Any amino acid
  VARIANT 40: note = Any amino acid
  VARIANT 41: note = Any amino acid
  VARIANT 42: note = Any amino acid
  VARIANT 43: note = Any amino acid
  VARIANT 44: note = Any amino acid
  VARIANT 45: note = Any amino acid
  VARIANT 46: note = Any amino acid
  VARIANT 48: note = Any amino acid
  VARIANT 49: note = Any amino acid
  VARIANT 50: note = Any amino acid
  VARIANT 51: note = Any amino acid
  VARIANT 52: note = Any amino acid
  VARIANT 53: note = Any amino acid
  VARIANT 54: note = Any amino acid
  VARIANT 55: note = Any amino acid
  VARIANT 56: note = Any amino acid
  VARIANT 57: note = Any amino acid
  VARIANT 58: note = Any amino acid
  VARIANT 59: note = Any amino acid
  VARIANT 60: note = Any amino acid
  VARIANT 61: note = Any amino acid
  VARIANT 62: note = Any amino acid
  VARIANT 63: note = Any amino acid
  VARIANT 64: note = Any amino acid
  VARIANT 65: note = Any amino acid
  VARIANT 66: note = Any amino acid
  VARIANT 67: note = Any amino acid
  VARIANT 68: note = Any amino acid
  VARIANT 69: note = Any amino acid
  VARIANT 70: note = Any amino acid
  VARIANT 71: note = Any amino acid
  VARIANT 72: note = Any amino acid
  VARIANT 73: note = Any amino acid
  VARIANT 74: note = Any amino acid
  VARIANT 75: note = Any amino acid
  VARIANT 76: note = Any amino acid
  VARIANT 77: note = Any amino acid
  VARIANT 78: note = Any amino acid
  VARIANT 79: note = Any amino acid
  VARIANT 80: note = Any amino acid
  VARIANT 81: note = Any amino acid
  VARIANT 82: note = Any amino acid
  VARIANT 83: note = Any amino acid
  VARIANT 85: note = Any amino acid
  VARIANT 87: note = Any amino acid
  VARIANT 88: note = Any amino acid
DXXXXXXXXXXXXXXXXXXXXXXXXXXXXXXXXXXXXXXXXXXXXXIXXXXXXXXXXXXXXXXXXXXXXXXXXXXXXXXXXXXKXDXXD

SEQ ID NO: 796612 - protein, 89 aa, unidentified
  VARIANT 2: note = Any amino acid
  VARIANT 3: note = Any amino acid
  VARIANT 4: note = Any amino acid
  VARIANT 5: note = Any amino acid
  VARIANT 6: note = Any amino acid
  VARIANT 7: note = Any amino acid
  VARIANT 8: note = Any amino acid
  VARIANT 9: note = Any amino acid
  VARIANT 10: note = Any amino acid
  VARIANT 11: note = Any amino acid
  VARIANT 12: note = Any amino acid
  VARIANT 13: note = Any amino acid
  VARIANT 14: note = Any amino acid
  VARIANT 15: note = Any amino acid
  VARIANT 16: note = Any amino acid
  VARIANT 17: note = Any amino acid
  VARIANT 18: note = Any amino acid
  VARIANT 19: note = Any amino acid
  VARIANT 20: note = Any amino acid
  VARIANT 21: note = Any amino acid
  VARIANT 22: note = Any amino acid
  VARIANT 23: note = Any amino acid
  VARIANT 24: note = Any amino acid
  VARIANT 25: note = Any amino acid
  VARIANT 26: note = Any amino acid
  VARIANT 27: note = Any amino acid
  VARIANT 28: note = Any amino acid
  VARIANT 29: note = Any amino acid
  VARIANT 30: note = Any amino acid
  VARIANT 31: note = Any amino acid
  VARIANT 32: note = Any amino acid
  VARIANT 33: note = Any amino acid
  VARIANT 34: note = Any amino acid
  VARIANT 35: note = Any amino acid
  VARIANT 36: note = Any amino acid
  VARIANT 37: note = Any amino acid
  VARIANT 38: note = Any amino acid
  VARIANT 39: note = Any amino acid
  VARIANT 40: note = Any amino acid
  VARIANT 41: note = Any amino acid
  VARIANT 42: note = Any amino acid
  VARIANT 43: note = Any amino acid
  VARIANT 44: note = Any amino acid
  VARIANT 45: note = Any amino acid
  VARIANT 46: note = Any amino acid
  VARIANT 48: note = Any amino acid
  VARIANT 49: note = Any amino acid
  VARIANT 50: note = Any amino acid
  VARIANT 51: note = Any amino acid
  VARIANT 52: note = Any amino acid
  VARIANT 53: note = Any amino acid
  VARIANT 54: note = Any amino acid
  VARIANT 55: note = Any amino acid
  VARIANT 56: note = Any amino acid
  VARIANT 57: note = Any amino acid
  VARIANT 58: note = Any amino acid
  VARIANT 59: note = Any amino acid
  VARIANT 60: note = Any amino acid
  VARIANT 61: note = Any amino acid
  VARIANT 62: note = Any amino acid
  VARIANT 63: note = Any amino acid
  VARIANT 64: note = Any amino acid
  VARIANT 65: note = Any amino acid
  VARIANT 66: note = Any amino acid
  VARIANT 67: note = Any amino acid
  VARIANT 68: note = Any amino acid
  VARIANT 69: note = Any amino acid
  VARIANT 70: note = Any amino acid
  VARIANT 71: note = Any amino acid
  VARIANT 72: note = Any amino acid
  VARIANT 73: note = Any amino acid
  VARIANT 74: note = Any amino acid
  VARIANT 75: note = Any amino acid
  VARIANT 76: note = Any amino acid
  VARIANT 77: note = Any amino acid
  VARIANT 78: note = Any amino acid
  VARIANT 79: note = Any amino acid
  VARIANT 80: note = Any amino acid
  VARIANT 81: note = Any amino acid
  VARIANT 82: note = Any amino acid
  VARIANT 83: note = Any amino acid
  VARIANT 85: note = Any amino acid
  VARIANT 87: note = Any amino acid
  VARIANT 88: note = Any amino acid
DXXXXXXXXXXXXXXXXXXXXXXXXXXXXXXXXXXXXXXXXXXXXXVXXXXXXXXXXXXXXXXXXXXXXXXXXXXXXXXXXXXKXDXXD

SEQ ID NO: 796613 - protein, 88 aa, unidentified
  VARIANT 2: note = Any amino acid
  VARIANT 3: note = Any amino acid
  VARIANT 4: note = Any amino acid
  VARIANT 5: note = Any amino acid
  VARIANT 6: note = Any amino acid
  VARIANT 7: note = Any amino acid
  VARIANT 8: note = Any amino acid
  VARIANT 9: note = Any amino acid
  VARIANT 10: note = Any amino acid
  VARIANT 11: note = Any amino acid
  VARIANT 12: note = Any amino acid
  VARIANT 13: note = Any amino acid
  VARIANT 14: note = Any amino acid
  VARIANT 15: note = Any amino acid
  VARIANT 16: note = Any amino acid
  VARIANT 17: note = Any amino acid
  VARIANT 18: note = Any amino acid
  VARIANT 19: note = Any amino acid
  VARIANT 20: note = Any amino acid
  VARIANT 21: note = Any amino acid
  VARIANT 22: note = Any amino acid
  VARIANT 23: note = Any amino acid
  VARIANT 24: note = Any amino acid
  VARIANT 25: note = Any amino acid
  VARIANT 26: note = Any amino acid
  VARIANT 27: note = Any amino acid
  VARIANT 28: note = Any amino acid
  VARIANT 29: note = Any amino acid
  VARIANT 30: note = Any amino acid
  VARIANT 31: note = Any amino acid
  VARIANT 32: note = Any amino acid
  VARIANT 33: note = Any amino acid
  VARIANT 34: note = Any amino acid
  VARIANT 35: note = Any amino acid
  VARIANT 36: note = Any amino acid
  VARIANT 37: note = Any amino acid
  VARIANT 38: note = Any amino acid
  VARIANT 39: note = Any amino acid
  VARIANT 40: note = Any amino acid
  VARIANT 41: note = Any amino acid
  VARIANT 42: note = Any amino acid
  VARIANT 43: note = Any amino acid
  VARIANT 44: note = Any amino acid
  VARIANT 46: note = Any amino acid
  VARIANT 47: note = Any amino acid
  VARIANT 48: note = Any amino acid
  VARIANT 49: note = Any amino acid
  VARIANT 50: note = Any amino acid
  VARIANT 51: note = Any amino acid
  VARIANT 52: note = Any amino acid
  VARIANT 53: note = Any amino acid
  VARIANT 54: note = Any amino acid
  VARIANT 55: note = Any amino acid
  VARIANT 56: note = Any amino acid
  VARIANT 57: note = Any amino acid
  VARIANT 58: note = Any amino acid
  VARIANT 59: note = Any amino acid
  VARIANT 60: note = Any amino acid
  VARIANT 61: note = Any amino acid
  VARIANT 62: note = Any amino acid
  VARIANT 63: note = Any amino acid
  VARIANT 64: note = Any amino acid
  VARIANT 65: note = Any amino acid
  VARIANT 66: note = Any amino acid
  VARIANT 67: note = Any amino acid
  VARIANT 68: note = Any amino acid
  VARIANT 69: note = Any amino acid
  VARIANT 70: note = Any amino acid
  VARIANT 71: note = Any amino acid
  VARIANT 72: note = Any amino acid
  VARIANT 73: note = Any amino acid
  VARIANT 74: note = Any amino acid
  VARIANT 75: note = Any amino acid
  VARIANT 76: note = Any amino acid
  VARIANT 77: note = Any amino acid
  VARIANT 78: note = Any amino acid
  VARIANT 79: note = Any amino acid
  VARIANT 80: note = Any amino acid
  VARIANT 81: note = Any amino acid
  VARIANT 82: note = Any amino acid
  VARIANT 84: note = Any amino acid
  VARIANT 86: note = Any amino acid
  VARIANT 87: note = Any amino acid
DXXXXXXXXXXXXXXXXXXXXXXXXXXXXXXXXXXXXXXXXXXXAXXXXXXXXXXXXXXXXXXXXXXXXXXXXXXXXXXXXXKXDXXD

SEQ ID NO: 796614 - protein, 90 aa, unidentified
  VARIANT 2: note = Any amino acid
  VARIANT 3: note = Any amino acid
  VARIANT 4: note = Any amino acid
  VARIANT 5: note = Any amino acid
  VARIANT 6: note = Any amino acid
  VARIANT 7: note = Any amino acid
  VARIANT 8: note = Any amino acid
  VARIANT 9: note = Any amino acid
  VARIANT 10: note = Any amino acid
  VARIANT 11: note = Any amino acid
  VARIANT 12: note = Any amino acid
  VARIANT 13: note = Any amino acid
  VARIANT 14: note = Any amino acid
  VARIANT 15: note = Any amino acid
  VARIANT 16: note = Any amino acid
  VARIANT 17: note = Any amino acid
  VARIANT 18: note = Any amino acid
  VARIANT 19: note = Any amino acid
  VARIANT 20: note = Any amino acid
  VARIANT 21: note = Any amino acid
  VARIANT 22: note = Any amino acid
  VARIANT 23: note = Any amino acid
  VARIANT 24: note = Any amino acid
  VARIANT 25: note = Any amino acid
  VARIANT 26: note = Any amino acid
  VARIANT 27: note = Any amino acid
  VARIANT 28: note = Any amino acid
  VARIANT 29: note = Any amino acid
  VARIANT 30: note = Any amino acid
  VARIANT 31: note = Any amino acid
  VARIANT 32: note = Any amino acid
  VARIANT 33: note = Any amino acid
  VARIANT 34: note = Any amino acid
  VARIANT 35: note = Any amino acid
  VARIANT 36: note = Any amino acid
  VARIANT 37: note = Any amino acid
  VARIANT 38: note = Any amino acid
  VARIANT 39: note = Any amino acid
  VARIANT 40: note = Any amino acid
  VARIANT 41: note = Any amino acid
  VARIANT 42: note = Any amino acid
  VARIANT 43: note = Any amino acid
  VARIANT 44: note = Any amino acid
  VARIANT 45: note = Any amino acid
  VARIANT 46: note = Any amino acid
  VARIANT 48: note = Any amino acid
  VARIANT 49: note = Any amino acid
  VARIANT 50: note = Any amino acid
  VARIANT 51: note = Any amino acid
  VARIANT 52: note = Any amino acid
  VARIANT 53: note = Any amino acid
  VARIANT 54: note = Any amino acid
  VARIANT 55: note = Any amino acid
  VARIANT 56: note = Any amino acid
  VARIANT 57: note = Any amino acid
  VARIANT 58: note = Any amino acid
  VARIANT 59: note = Any amino acid
  VARIANT 60: note = Any amino acid
  VARIANT 61: note = Any amino acid
  VARIANT 62: note = Any amino acid
  VARIANT 63: note = Any amino acid
  VARIANT 64: note = Any amino acid
  VARIANT 65: note = Any amino acid
  VARIANT 66: note = Any amino acid
  VARIANT 67: note = Any amino acid
  VARIANT 68: note = Any amino acid
  VARIANT 69: note = Any amino acid
  VARIANT 70: note = Any amino acid
  VARIANT 71: note = Any amino acid
  VARIANT 72: note = Any amino acid
  VARIANT 73: note = Any amino acid
  VARIANT 74: note = Any amino acid
  VARIANT 75: note = Any amino acid
  VARIANT 76: note = Any amino acid
  VARIANT 77: note = Any amino acid
  VARIANT 78: note = Any amino acid
  VARIANT 79: note = Any amino acid
  VARIANT 80: note = Any amino acid
  VARIANT 81: note = Any amino acid
  VARIANT 82: note = Any amino acid
  VARIANT 83: note = Any amino acid
  VARIANT 84: note = Any amino acid
  VARIANT 86: note = Any amino acid
  VARIANT 88: note = Any amino acid
  VARIANT 89: note = Any amino acid
DXXXXXXXXXXXXXXXXXXXXXXXXXXXXXXXXXXXXXXXXXXXXXYXXXXXXXXXXXXXXXXXXXXXXXXXXXXXXXXXXXXXKXNXXD

SEQ ID NO: 796615 - protein, 91 aa, unidentified
  VARIANT 2: note = Any amino acid
  VARIANT 3: note = Any amino acid
  VARIANT 4: note = Any amino acid
  VARIANT 5: note = Any amino acid
  VARIANT 6: note = Any amino acid
  VARIANT 7: note = Any amino acid
  VARIANT 8: note = Any amino acid
  VARIANT 9: note = Any amino acid
  VARIANT 10: note = Any amino acid
  VARIANT 11: note = Any amino acid
  VARIANT 12: note = Any amino acid
  VARIANT 13: note = Any amino acid
  VARIANT 14: note = Any amino acid
  VARIANT 15: note = Any amino acid
  VARIANT 16: note = Any amino acid
  VARIANT 17: note = Any amino acid
  VARIANT 18: note = Any amino acid
  VARIANT 19: note = Any amino acid
  VARIANT 20: note = Any amino acid
  VARIANT 21: note = Any amino acid
  VARIANT 22: note = Any amino acid
  VARIANT 23: note = Any amino acid
  VARIANT 24: note = Any amino acid
  VARIANT 25: note = Any amino acid
  VARIANT 26: note = Any amino acid
  VARIANT 27: note = Any amino acid
  VARIANT 28: note = Any amino acid
  VARIANT 29: note = Any amino acid
  VARIANT 30: note = Any amino acid
  VARIANT 31: note = Any amino acid
  VARIANT 32: note = Any amino acid
  VARIANT 33: note = Any amino acid
  VARIANT 34: note = Any amino acid
  VARIANT 35: note = Any amino acid
  VARIANT 36: note = Any amino acid
  VARIANT 37: note = Any amino acid
  VARIANT 38: note = Any amino acid
  VARIANT 39: note = Any amino acid
  VARIANT 40: note = Any amino acid
  VARIANT 41: note = Any amino acid
  VARIANT 42: note = Any amino acid
  VARIANT 43: note = Any amino acid
  VARIANT 44: note = Any amino acid
  VARIANT 45: note = Any amino acid
  VARIANT 46: note = Any amino acid
  VARIANT 47: note = Any amino acid
  VARIANT 49: note = Any amino acid
  VARIANT 50: note = Any amino acid
  VARIANT 51: note = Any amino acid
  VARIANT 52: note = Any amino acid
  VARIANT 53: note = Any amino acid
  VARIANT 54: note = Any amino acid
  VARIANT 55: note = Any amino acid
  VARIANT 56: note = Any amino acid
  VARIANT 57: note = Any amino acid
  VARIANT 58: note = Any amino acid
  VARIANT 59: note = Any amino acid
  VARIANT 60: note = Any amino acid
  VARIANT 61: note = Any amino acid
  VARIANT 62: note = Any amino acid
  VARIANT 63: note = Any amino acid
  VARIANT 64: note = Any amino acid
  VARIANT 65: note = Any amino acid
  VARIANT 66: note = Any amino acid
  VARIANT 67: note = Any amino acid
  VARIANT 68: note = Any amino acid
  VARIANT 69: note = Any amino acid
  VARIANT 70: note = Any amino acid
  VARIANT 71: note = Any amino acid
  VARIANT 72: note = Any amino acid
  VARIANT 73: note = Any amino acid
  VARIANT 74: note = Any amino acid
  VARIANT 75: note = Any amino acid
  VARIANT 76: note = Any amino acid
  VARIANT 77: note = Any amino acid
  VARIANT 78: note = Any amino acid
  VARIANT 79: note = Any amino acid
  VARIANT 80: note = Any amino acid
  VARIANT 81: note = Any amino acid
  VARIANT 82: note = Any amino acid
  VARIANT 83: note = Any amino acid
  VARIANT 84: note = Any amino acid
  VARIANT 85: note = Any amino acid
  VARIANT 87: note = Any amino acid
  VARIANT 89: note = Any amino acid
  VARIANT 90: note = Any amino acid
DXXXXXXXXXXXXXXXXXXXXXXXXXXXXXXXXXXXXXXXXXXXXXXCXXXXXXXXXXXXXXXXXXXXXXXXXXXXXXXXXXXXXKXDXXD

SEQ ID NO: 796616 - protein, 86 aa, unidentified
  VARIANT 2: note = Any amino acid
  VARIANT 3: note = Any amino acid
  VARIANT 4: note = Any amino acid
  VARIANT 5: note = Any amino acid
  VARIANT 6: note = Any amino acid
  VARIANT 7: note = Any amino acid
  VARIANT 8: note = Any amino acid
  VARIANT 9: note = Any amino acid
  VARIANT 10: note = Any amino acid
  VARIANT 11: note = Any amino acid
  VARIANT 12: note = Any amino acid
  VARIANT 13: note = Any amino acid
  VARIANT 14: note = Any amino acid
  VARIANT 15: note = Any amino acid
  VARIANT 16: note = Any amino acid
  VARIANT 17: note = Any amino acid
  VARIANT 18: note = Any amino acid
  VARIANT 19: note = Any amino acid
  VARIANT 20: note = Any amino acid
  VARIANT 21: note = Any amino acid
  VARIANT 22: note = Any amino acid
  VARIANT 23: note = Any amino acid
  VARIANT 24: note = Any amino acid
  VARIANT 25: note = Any amino acid
  VARIANT 26: note = Any amino acid
  VARIANT 27: note = Any amino acid
  VARIANT 28: note = Any amino acid
  VARIANT 29: note = Any amino acid
  VARIANT 30: note = Any amino acid
  VARIANT 31: note = Any amino acid
  VARIANT 32: note = Any amino acid
  VARIANT 33: note = Any amino acid
  VARIANT 34: note = Any amino acid
  VARIANT 35: note = Any amino acid
  VARIANT 36: note = Any amino acid
  VARIANT 37: note = Any amino acid
  VARIANT 38: note = Any amino acid
  VARIANT 39: note = Any amino acid
  VARIANT 40: note = Any amino acid
  VARIANT 41: note = Any amino acid
  VARIANT 42: note = Any amino acid
  VARIANT 44: note = Any amino acid
  VARIANT 45: note = Any amino acid
  VARIANT 46: note = Any amino acid
  VARIANT 47: note = Any amino acid
  VARIANT 48: note = Any amino acid
  VARIANT 49: note = Any amino acid
  VARIANT 50: note = Any amino acid
  VARIANT 51: note = Any amino acid
  VARIANT 52: note = Any amino acid
  VARIANT 53: note = Any amino acid
  VARIANT 54: note = Any amino acid
  VARIANT 55: note = Any amino acid
  VARIANT 56: note = Any amino acid
  VARIANT 57: note = Any amino acid
  VARIANT 58: note = Any amino acid
  VARIANT 59: note = Any amino acid
  VARIANT 60: note = Any amino acid
  VARIANT 61: note = Any amino acid
  VARIANT 62: note = Any amino acid
  VARIANT 63: note = Any amino acid
  VARIANT 64: note = Any amino acid
  VARIANT 65: note = Any amino acid
  VARIANT 66: note = Any amino acid
  VARIANT 67: note = Any amino acid
  VARIANT 68: note = Any amino acid
  VARIANT 69: note = Any amino acid
  VARIANT 70: note = Any amino acid
  VARIANT 71: note = Any amino acid
  VARIANT 72: note = Any amino acid
  VARIANT 73: note = Any amino acid
  VARIANT 74: note = Any amino acid
  VARIANT 75: note = Any amino acid
  VARIANT 76: note = Any amino acid
  VARIANT 77: note = Any amino acid
  VARIANT 78: note = Any amino acid
  VARIANT 79: note = Any amino acid
  VARIANT 80: note = Any amino acid
  VARIANT 82: note = Any amino acid
  VARIANT 84: note = Any amino acid
  VARIANT 85: note = Any amino acid
DXXXXXXXXXXXXXXXXXXXXXXXXXXXXXXXXXXXXXXXXXEXXXXXXXXXXXXXXXXXXXXXXXXXXXXXXXXXXXXXKXDXXD

SEQ ID NO: 796617 - protein, 88 aa, unidentified
  VARIANT 2: note = Any amino acid
  VARIANT 3: note = Any amino acid
  VARIANT 4: note = Any amino acid
  VARIANT 5: note = Any amino acid
  VARIANT 6: note = Any amino acid
  VARIANT 7: note = Any amino acid
  VARIANT 8: note = Any amino acid
  VARIANT 9: note = Any amino acid
  VARIANT 10: note = Any amino acid
  VARIANT 11: note = Any amino acid
  VARIANT 12: note = Any amino acid
  VARIANT 13: note = Any amino acid
  VARIANT 14: note = Any amino acid
  VARIANT 15: note = Any amino acid
  VARIANT 16: note = Any amino acid
  VARIANT 17: note = Any amino acid
  VARIANT 18: note = Any amino acid
  VARIANT 19: note = Any amino acid
  VARIANT 20: note = Any amino acid
  VARIANT 21: note = Any amino acid
  VARIANT 22: note = Any amino acid
  VARIANT 23: note = Any amino acid
  VARIANT 24: note = Any amino acid
  VARIANT 25: note = Any amino acid
  VARIANT 26: note = Any amino acid
  VARIANT 27: note = Any amino acid
  VARIANT 28: note = Any amino acid
  VARIANT 29: note = Any amino acid
  VARIANT 30: note = Any amino acid
  VARIANT 31: note = Any amino acid
  VARIANT 32: note = Any amino acid
  VARIANT 33: note = Any amino acid
  VARIANT 34: note = Any amino acid
  VARIANT 35: note = Any amino acid
  VARIANT 36: note = Any amino acid
  VARIANT 37: note = Any amino acid
  VARIANT 38: note = Any amino acid
  VARIANT 39: note = Any amino acid
  VARIANT 40: note = Any amino acid
  VARIANT 41: note = Any amino acid
  VARIANT 42: note = Any amino acid
  VARIANT 43: note = Any amino acid
  VARIANT 45: note = Any amino acid
  VARIANT 46: note = Any amino acid
  VARIANT 47: note = Any amino acid
  VARIANT 48: note = Any amino acid
  VARIANT 49: note = Any amino acid
  VARIANT 50: note = Any amino acid
  VARIANT 51: note = Any amino acid
  VARIANT 52: note = Any amino acid
  VARIANT 53: note = Any amino acid
  VARIANT 54: note = Any amino acid
  VARIANT 55: note = Any amino acid
  VARIANT 56: note = Any amino acid
  VARIANT 57: note = Any amino acid
  VARIANT 58: note = Any amino acid
  VARIANT 59: note = Any amino acid
  VARIANT 60: note = Any amino acid
  VARIANT 61: note = Any amino acid
  VARIANT 62: note = Any amino acid
  VARIANT 63: note = Any amino acid
  VARIANT 64: note = Any amino acid
  VARIANT 65: note = Any amino acid
  VARIANT 66: note = Any amino acid
  VARIANT 67: note = Any amino acid
  VARIANT 68: note = Any amino acid
  VARIANT 69: note = Any amino acid
  VARIANT 70: note = Any amino acid
  VARIANT 71: note = Any amino acid
  VARIANT 72: note = Any amino acid
  VARIANT 73: note = Any amino acid
  VARIANT 74: note = Any amino acid
  VARIANT 75: note = Any amino acid
  VARIANT 76: note = Any amino acid
  VARIANT 77: note = Any amino acid
  VARIANT 78: note = Any amino acid
  VARIANT 79: note = Any amino acid
  VARIANT 80: note = Any amino acid
  VARIANT 81: note = Any amino acid
  VARIANT 82: note = Any amino acid
  VARIANT 84: note = Any amino acid
  VARIANT 86: note = Any amino acid
  VARIANT 87: note = Any amino acid
DXXXXXXXXXXXXXXXXXXXXXXXXXXXXXXXXXXXXXXXXXXEXXXXXXXXXXXXXXXXXXXXXXXXXXXXXXXXXXXXXXKXDXXD

SEQ ID NO: 796618 - protein, 87 aa, unidentified
  VARIANT 2: note = Any amino acid
  VARIANT 3: note = Any amino acid
  VARIANT 4: note = Any amino acid
  VARIANT 5: note = Any amino acid
  VARIANT 6: note = Any amino acid
  VARIANT 7: note = Any amino acid
  VARIANT 8: note = Any amino acid
  VARIANT 9: note = Any amino acid
  VARIANT 10: note = Any amino acid
  VARIANT 11: note = Any amino acid
  VARIANT 12: note = Any amino acid
  VARIANT 13: note = Any amino acid
  VARIANT 14: note = Any amino acid
  VARIANT 15: note = Any amino acid
  VARIANT 16: note = Any amino acid
  VARIANT 17: note = Any amino acid
  VARIANT 18: note = Any amino acid
  VARIANT 19: note = Any amino acid
  VARIANT 20: note = Any amino acid
  VARIANT 21: note = Any amino acid
  VARIANT 22: note = Any amino acid
  VARIANT 23: note = Any amino acid
  VARIANT 24: note = Any amino acid
  VARIANT 25: note = Any amino acid
  VARIANT 26: note = Any amino acid
  VARIANT 27: note = Any amino acid
  VARIANT 28: note = Any amino acid
  VARIANT 29: note = Any amino acid
  VARIANT 30: note = Any amino acid
  VARIANT 31: note = Any amino acid
  VARIANT 32: note = Any amino acid
  VARIANT 33: note = Any amino acid
  VARIANT 34: note = Any amino acid
  VARIANT 35: note = Any amino acid
  VARIANT 36: note = Any amino acid
  VARIANT 37: note = Any amino acid
  VARIANT 38: note = Any amino acid
  VARIANT 39: note = Any amino acid
  VARIANT 40: note = Any amino acid
  VARIANT 41: note = Any amino acid
  VARIANT 42: note = Any amino acid
  VARIANT 43: note = Any amino acid
  VARIANT 44: note = Any amino acid
  VARIANT 45: note = Any amino acid
  VARIANT 47: note = Any amino acid
  VARIANT 48: note = Any amino acid
  VARIANT 49: note = Any amino acid
  VARIANT 50: note = Any amino acid
  VARIANT 51: note = Any amino acid
  VARIANT 52: note = Any amino acid
  VARIANT 53: note = Any amino acid
  VARIANT 54: note = Any amino acid
  VARIANT 55: note = Any amino acid
  VARIANT 56: note = Any amino acid
  VARIANT 57: note = Any amino acid
  VARIANT 58: note = Any amino acid
  VARIANT 59: note = Any amino acid
  VARIANT 60: note = Any amino acid
  VARIANT 61: note = Any amino acid
  VARIANT 62: note = Any amino acid
  VARIANT 63: note = Any amino acid
  VARIANT 64: note = Any amino acid
  VARIANT 65: note = Any amino acid
  VARIANT 66: note = Any amino acid
  VARIANT 67: note = Any amino acid
  VARIANT 68: note = Any amino acid
  VARIANT 69: note = Any amino acid
  VARIANT 70: note = Any amino acid
  VARIANT 71: note = Any amino acid
  VARIANT 72: note = Any amino acid
  VARIANT 73: note = Any amino acid
  VARIANT 74: note = Any amino acid
  VARIANT 75: note = Any amino acid
  VARIANT 76: note = Any amino acid
  VARIANT 77: note = Any amino acid
  VARIANT 78: note = Any amino acid
  VARIANT 79: note = Any amino acid
  VARIANT 80: note = Any amino acid
  VARIANT 81: note = Any amino acid
  VARIANT 83: note = Any amino acid
  VARIANT 85: note = Any amino acid
  VARIANT 86: note = Any amino acid
DXXXXXXXXXXXXXXXXXXXXXXXXXXXXXXXXXXXXXXXXXXXXEXXXXXXXXXXXXXXXXXXXXXXXXXXXXXXXXXXXHXDXXD

SEQ ID NO: 796619 - protein, 89 aa, unidentified
  VARIANT 2: note = Any amino acid
  VARIANT 3: note = Any amino acid
  VARIANT 4: note = Any amino acid
  VARIANT 5: note = Any amino acid
  VARIANT 6: note = Any amino acid
  VARIANT 7: note = Any amino acid
  VARIANT 8: note = Any amino acid
  VARIANT 9: note = Any amino acid
  VARIANT 10: note = Any amino acid
  VARIANT 11: note = Any amino acid
  VARIANT 12: note = Any amino acid
  VARIANT 13: note = Any amino acid
  VARIANT 14: note = Any amino acid
  VARIANT 15: note = Any amino acid
  VARIANT 16: note = Any amino acid
  VARIANT 17: note = Any amino acid
  VARIANT 18: note = Any amino acid
  VARIANT 19: note = Any amino acid
  VARIANT 20: note = Any amino acid
  VARIANT 21: note = Any amino acid
  VARIANT 22: note = Any amino acid
  VARIANT 23: note = Any amino acid
  VARIANT 24: note = Any amino acid
  VARIANT 25: note = Any amino acid
  VARIANT 26: note = Any amino acid
  VARIANT 27: note = Any amino acid
  VARIANT 28: note = Any amino acid
  VARIANT 29: note = Any amino acid
  VARIANT 30: note = Any amino acid
  VARIANT 31: note = Any amino acid
  VARIANT 32: note = Any amino acid
  VARIANT 33: note = Any amino acid
  VARIANT 34: note = Any amino acid
  VARIANT 35: note = Any amino acid
  VARIANT 36: note = Any amino acid
  VARIANT 37: note = Any amino acid
  VARIANT 38: note = Any amino acid
  VARIANT 39: note = Any amino acid
  VARIANT 40: note = Any amino acid
  VARIANT 41: note = Any amino acid
  VARIANT 42: note = Any amino acid
  VARIANT 43: note = Any amino acid
  VARIANT 44: note = Any amino acid
  VARIANT 45: note = Any amino acid
  VARIANT 46: note = Any amino acid
  VARIANT 47: note = Any amino acid
  VARIANT 49: note = Any amino acid
  VARIANT 50: note = Any amino acid
  VARIANT 51: note = Any amino acid
  VARIANT 52: note = Any amino acid
  VARIANT 53: note = Any amino acid
  VARIANT 54: note = Any amino acid
  VARIANT 55: note = Any amino acid
  VARIANT 56: note = Any amino acid
  VARIANT 57: note = Any amino acid
  VARIANT 58: note = Any amino acid
  VARIANT 59: note = Any amino acid
  VARIANT 60: note = Any amino acid
  VARIANT 61: note = Any amino acid
  VARIANT 62: note = Any amino acid
  VARIANT 63: note = Any amino acid
  VARIANT 64: note = Any amino acid
  VARIANT 65: note = Any amino acid
  VARIANT 66: note = Any amino acid
  VARIANT 67: note = Any amino acid
  VARIANT 68: note = Any amino acid
  VARIANT 69: note = Any amino acid
  VARIANT 70: note = Any amino acid
  VARIANT 71: note = Any amino acid
  VARIANT 72: note = Any amino acid
  VARIANT 73: note = Any amino acid
  VARIANT 74: note = Any amino acid
  VARIANT 75: note = Any amino acid
  VARIANT 76: note = Any amino acid
  VARIANT 77: note = Any amino acid
  VARIANT 78: note = Any amino acid
  VARIANT 79: note = Any amino acid
  VARIANT 80: note = Any amino acid
  VARIANT 81: note = Any amino acid
  VARIANT 82: note = Any amino acid
  VARIANT 83: note = Any amino acid
  VARIANT 85: note = Any amino acid
  VARIANT 87: note = Any amino acid
  VARIANT 88: note = Any amino acid
DXXXXXXXXXXXXXXXXXXXXXXXXXXXXXXXXXXXXXXXXXXXXXXEXXXXXXXXXXXXXXXXXXXXXXXXXXXXXXXXXXXKXDXXS

SEQ ID NO: 796620 - protein, 92 aa, unidentified
  VARIANT 2: note = Any amino acid
  VARIANT 3: note = Any amino acid
  VARIANT 4: note = Any amino acid
  VARIANT 5: note = Any amino acid
  VARIANT 6: note = Any amino acid
  VARIANT 7: note = Any amino acid
  VARIANT 8: note = Any amino acid
  VARIANT 9: note = Any amino acid
  VARIANT 10: note = Any amino acid
  VARIANT 11: note = Any amino acid
  VARIANT 12: note = Any amino acid
  VARIANT 13: note = Any amino acid
  VARIANT 14: note = Any amino acid
  VARIANT 15: note = Any amino acid
  VARIANT 16: note = Any amino acid
  VARIANT 17: note = Any amino acid
  VARIANT 18: note = Any amino acid
  VARIANT 19: note = Any amino acid
  VARIANT 20: note = Any amino acid
  VARIANT 21: note = Any amino acid
  VARIANT 22: note = Any amino acid
  VARIANT 23: note = Any amino acid
  VARIANT 24: note = Any amino acid
  VARIANT 25: note = Any amino acid
  VARIANT 26: note = Any amino acid
  VARIANT 27: note = Any amino acid
  VARIANT 28: note = Any amino acid
  VARIANT 29: note = Any amino acid
  VARIANT 30: note = Any amino acid
  VARIANT 31: note = Any amino acid
  VARIANT 32: note = Any amino acid
  VARIANT 33: note = Any amino acid
  VARIANT 34: note = Any amino acid
  VARIANT 35: note = Any amino acid
  VARIANT 36: note = Any amino acid
  VARIANT 37: note = Any amino acid
  VARIANT 38: note = Any amino acid
  VARIANT 39: note = Any amino acid
  VARIANT 40: note = Any amino acid
  VARIANT 41: note = Any amino acid
  VARIANT 42: note = Any amino acid
  VARIANT 43: note = Any amino acid
  VARIANT 44: note = Any amino acid
  VARIANT 45: note = Any amino acid
  VARIANT 46: note = Any amino acid
  VARIANT 47: note = Any amino acid
  VARIANT 48: note = Any amino acid
  VARIANT 50: note = Any amino acid
  VARIANT 51: note = Any amino acid
  VARIANT 52: note = Any amino acid
  VARIANT 53: note = Any amino acid
  VARIANT 54: note = Any amino acid
  VARIANT 55: note = Any amino acid
  VARIANT 56: note = Any amino acid
  VARIANT 57: note = Any amino acid
  VARIANT 58: note = Any amino acid
  VARIANT 59: note = Any amino acid
  VARIANT 60: note = Any amino acid
  VARIANT 61: note = Any amino acid
  VARIANT 62: note = Any amino acid
  VARIANT 63: note = Any amino acid
  VARIANT 64: note = Any amino acid
  VARIANT 65: note = Any amino acid
  VARIANT 66: note = Any amino acid
  VARIANT 67: note = Any amino acid
  VARIANT 68: note = Any amino acid
  VARIANT 69: note = Any amino acid
  VARIANT 70: note = Any amino acid
  VARIANT 71: note = Any amino acid
  VARIANT 72: note = Any amino acid
  VARIANT 73: note = Any amino acid
  VARIANT 74: note = Any amino acid
  VARIANT 75: note = Any amino acid
  VARIANT 76: note = Any amino acid
  VARIANT 77: note = Any amino acid
  VARIANT 78: note = Any amino acid
  VARIANT 79: note = Any amino acid
  VARIANT 80: note = Any amino acid
  VARIANT 81: note = Any amino acid
  VARIANT 82: note = Any amino acid
  VARIANT 83: note = Any amino acid
  VARIANT 84: note = Any amino acid
  VARIANT 85: note = Any amino acid
  VARIANT 86: note = Any amino acid
  VARIANT 88: note = Any amino acid
  VARIANT 90: note = Any amino acid
  VARIANT 91: note = Any amino acid
DXXXXXXXXXXXXXXXXXXXXXXXXXXXXXXXXXXXXXXXXXXXXXXXCXXXXXXXXXXXXXXXXXXXXXXXXXXXXXXXXXXXXXKXDXXD

SEQ ID NO: 796621 - protein, 100 aa, unidentified
  VARIANT 2: note = Any amino acid
  VARIANT 3: note = Any amino acid
  VARIANT 4: note = Any amino acid
  VARIANT 5: note = Any amino acid
  VARIANT 6: note = Any amino acid
  VARIANT 7: note = Any amino acid
  VARIANT 8: note = Any amino acid
  VARIANT 9: note = Any amino acid
  VARIANT 10: note = Any amino acid
  VARIANT 11: note = Any amino acid
  VARIANT 12: note = Any amino acid
  VARIANT 13: note = Any amino acid
  VARIANT 14: note = Any amino acid
  VARIANT 15: note = Any amino acid
  VARIANT 16: note = Any amino acid
  VARIANT 17: note = Any amino acid
  VARIANT 18: note = Any amino acid
  VARIANT 19: note = Any amino acid
  VARIANT 20: note = Any amino acid
  VARIANT 21: note = Any amino acid
  VARIANT 22: note = Any amino acid
  VARIANT 23: note = Any amino acid
  VARIANT 24: note = Any amino acid
  VARIANT 25: note = Any amino acid
  VARIANT 26: note = Any amino acid
  VARIANT 27: note = Any amino acid
  VARIANT 28: note = Any amino acid
  VARIANT 29: note = Any amino acid
  VARIANT 30: note = Any amino acid
  VARIANT 31: note = Any amino acid
  VARIANT 32: note = Any amino acid
  VARIANT 33: note = Any amino acid
  VARIANT 34: note = Any amino acid
  VARIANT 35: note = Any amino acid
  VARIANT 36: note = Any amino acid
  VARIANT 37: note = Any amino acid
  VARIANT 38: note = Any amino acid
  VARIANT 39: note = Any amino acid
  VARIANT 40: note = Any amino acid
  VARIANT 41: note = Any amino acid
  VARIANT 42: note = Any amino acid
  VARIANT 43: note = Any amino acid
  VARIANT 44: note = Any amino acid
  VARIANT 45: note = Any amino acid
  VARIANT 46: note = Any amino acid
  VARIANT 47: note = Any amino acid
  VARIANT 48: note = Any amino acid
  VARIANT 49: note = Any amino acid
  VARIANT 50: note = Any amino acid
  VARIANT 51: note = Any amino acid
  VARIANT 52: note = Any amino acid
  VARIANT 53: note = Any amino acid
  VARIANT 54: note = Any amino acid
  VARIANT 55: note = Any amino acid
  VARIANT 57: note = Any amino acid
  VARIANT 58: note = Any amino acid
  VARIANT 59: note = Any amino acid
  VARIANT 60: note = Any amino acid
  VARIANT 61: note = Any amino acid
  VARIANT 62: note = Any amino acid
  VARIANT 63: note = Any amino acid
  VARIANT 64: note = Any amino acid
  VARIANT 65: note = Any amino acid
  VARIANT 66: note = Any amino acid
  VARIANT 67: note = Any amino acid
  VARIANT 68: note = Any amino acid
  VARIANT 69: note = Any amino acid
  VARIANT 70: note = Any amino acid
  VARIANT 71: note = Any amino acid
  VARIANT 72: note = Any amino acid
  VARIANT 73: note = Any amino acid
  VARIANT 74: note = Any amino acid
  VARIANT 75: note = Any amino acid
  VARIANT 76: note = Any amino acid
  VARIANT 77: note = Any amino acid
  VARIANT 78: note = Any amino acid
  VARIANT 79: note = Any amino acid
  VARIANT 80: note = Any amino acid
  VARIANT 81: note = Any amino acid
  VARIANT 82: note = Any amino acid
  VARIANT 83: note = Any amino acid
  VARIANT 84: note = Any amino acid
  VARIANT 85: note = Any amino acid
  VARIANT 86: note = Any amino acid
  VARIANT 87: note = Any amino acid
  VARIANT 88: note = Any amino acid
  VARIANT 89: note = Any amino acid
  VARIANT 90: note = Any amino acid
  VARIANT 91: note = Any amino acid
  VARIANT 92: note = Any amino acid
  VARIANT 93: note = Any amino acid
  VARIANT 94: note = Any amino acid
  VARIANT 96: note = Any amino acid
  VARIANT 98: note = Any amino acid
  VARIANT 99: note = Any amino acid
DXXXXXXXXXXXXXXXXXXXXXXXXXXXXXXXXXXXXXXXXXXXXXXXXXXXXXXGXXXXXXXXXXXXXXXXXXXXXXXXXXXXXXXXXXXXXXKXDXXD

SEQ ID NO: 796622 - protein, 94 aa, unidentified
  VARIANT 2: note = Any amino acid
  VARIANT 3: note = Any amino acid
  VARIANT 4: note = Any amino acid
  VARIANT 5: note = Any amino acid
  VARIANT 6: note = Any amino acid
  VARIANT 7: note = Any amino acid
  VARIANT 8: note = Any amino acid
  VARIANT 9: note = Any amino acid
  VARIANT 10: note = Any amino acid
  VARIANT 11: note = Any amino acid
  VARIANT 12: note = Any amino acid
  VARIANT 13: note = Any amino acid
  VARIANT 14: note = Any amino acid
  VARIANT 15: note = Any amino acid
  VARIANT 16: note = Any amino acid
  VARIANT 17: note = Any amino acid
  VARIANT 18: note = Any amino acid
  VARIANT 19: note = Any amino acid
  VARIANT 20: note = Any amino acid
  VARIANT 21: note = Any amino acid
  VARIANT 22: note = Any amino acid
  VARIANT 23: note = Any amino acid
  VARIANT 24: note = Any amino acid
  VARIANT 25: note = Any amino acid
  VARIANT 26: note = Any amino acid
  VARIANT 27: note = Any amino acid
  VARIANT 28: note = Any amino acid
  VARIANT 29: note = Any amino acid
  VARIANT 30: note = Any amino acid
  VARIANT 31: note = Any amino acid
  VARIANT 32: note = Any amino acid
  VARIANT 33: note = Any amino acid
  VARIANT 34: note = Any amino acid
  VARIANT 35: note = Any amino acid
  VARIANT 36: note = Any amino acid
  VARIANT 37: note = Any amino acid
  VARIANT 38: note = Any amino acid
  VARIANT 39: note = Any amino acid
  VARIANT 40: note = Any amino acid
  VARIANT 41: note = Any amino acid
  VARIANT 42: note = Any amino acid
  VARIANT 43: note = Any amino acid
  VARIANT 44: note = Any amino acid
  VARIANT 45: note = Any amino acid
  VARIANT 46: note = Any amino acid
  VARIANT 47: note = Any amino acid
  VARIANT 48: note = Any amino acid
  VARIANT 49: note = Any amino acid
  VARIANT 51: note = Any amino acid
  VARIANT 52: note = Any amino acid
  VARIANT 53: note = Any amino acid
  VARIANT 54: note = Any amino acid
  VARIANT 55: note = Any amino acid
  VARIANT 56: note = Any amino acid
  VARIANT 57: note = Any amino acid
  VARIANT 58: note = Any amino acid
  VARIANT 59: note = Any amino acid
  VARIANT 60: note = Any amino acid
  VARIANT 61: note = Any amino acid
  VARIANT 62: note = Any amino acid
  VARIANT 63: note = Any amino acid
  VARIANT 64: note = Any amino acid
  VARIANT 65: note = Any amino acid
  VARIANT 66: note = Any amino acid
  VARIANT 67: note = Any amino acid
  VARIANT 68: note = Any amino acid
  VARIANT 69: note = Any amino acid
  VARIANT 70: note = Any amino acid
  VARIANT 71: note = Any amino acid
  VARIANT 72: note = Any amino acid
  VARIANT 73: note = Any amino acid
  VARIANT 74: note = Any amino acid
  VARIANT 75: note = Any amino acid
  VARIANT 76: note = Any amino acid
  VARIANT 77: note = Any amino acid
  VARIANT 78: note = Any amino acid
  VARIANT 79: note = Any amino acid
  VARIANT 80: note = Any amino acid
  VARIANT 81: note = Any amino acid
  VARIANT 82: note = Any amino acid
  VARIANT 83: note = Any amino acid
  VARIANT 84: note = Any amino acid
  VARIANT 85: note = Any amino acid
  VARIANT 86: note = Any amino acid
  VARIANT 87: note = Any amino acid
  VARIANT 88: note = Any amino acid
  VARIANT 90: note = Any amino acid
  VARIANT 92: note = Any amino acid
  VARIANT 93: note = Any amino acid
DXXXXXXXXXXXXXXXXXXXXXXXXXXXXXXXXXXXXXXXXXXXXXXXXCXXXXXXXXXXXXXXXXXXXXXXXXXXXXXXXXXXXXXXKXDXXD

SEQ ID NO: 796623 - protein, 89 aa, unidentified
  VARIANT 2: note = Any amino acid
  VARIANT 3: note = Any amino acid
  VARIANT 4: note = Any amino acid
  VARIANT 5: note = Any amino acid
  VARIANT 6: note = Any amino acid
  VARIANT 7: note = Any amino acid
  VARIANT 8: note = Any amino acid
  VARIANT 9: note = Any amino acid
  VARIANT 10: note = Any amino acid
  VARIANT 11: note = Any amino acid
  VARIANT 12: note = Any amino acid
  VARIANT 13: note = Any amino acid
  VARIANT 14: note = Any amino acid
  VARIANT 15: note = Any amino acid
  VARIANT 16: note = Any amino acid
  VARIANT 17: note = Any amino acid
  VARIANT 18: note = Any amino acid
  VARIANT 19: note = Any amino acid
  VARIANT 20: note = Any amino acid
  VARIANT 21: note = Any amino acid
  VARIANT 22: note = Any amino acid
  VARIANT 23: note = Any amino acid
  VARIANT 24: note = Any amino acid
  VARIANT 25: note = Any amino acid
  VARIANT 26: note = Any amino acid
  VARIANT 27: note = Any amino acid
  VARIANT 28: note = Any amino acid
  VARIANT 29: note = Any amino acid
  VARIANT 30: note = Any amino acid
  VARIANT 31: note = Any amino acid
  VARIANT 32: note = Any amino acid
  VARIANT 33: note = Any amino acid
  VARIANT 34: note = Any amino acid
  VARIANT 35: note = Any amino acid
  VARIANT 36: note = Any amino acid
  VARIANT 37: note = Any amino acid
  VARIANT 38: note = Any amino acid
  VARIANT 39: note = Any amino acid
  VARIANT 40: note = Any amino acid
  VARIANT 41: note = Any amino acid
  VARIANT 42: note = Any amino acid
  VARIANT 43: note = Any amino acid
  VARIANT 44: note = Any amino acid
  VARIANT 45: note = Any amino acid
  VARIANT 46: note = Any amino acid
  VARIANT 48: note = Any amino acid
  VARIANT 49: note = Any amino acid
  VARIANT 50: note = Any amino acid
  VARIANT 51: note = Any amino acid
  VARIANT 52: note = Any amino acid
  VARIANT 53: note = Any amino acid
  VARIANT 54: note = Any amino acid
  VARIANT 55: note = Any amino acid
  VARIANT 56: note = Any amino acid
  VARIANT 57: note = Any amino acid
  VARIANT 58: note = Any amino acid
  VARIANT 59: note = Any amino acid
  VARIANT 60: note = Any amino acid
  VARIANT 61: note = Any amino acid
  VARIANT 62: note = Any amino acid
  VARIANT 63: note = Any amino acid
  VARIANT 64: note = Any amino acid
  VARIANT 65: note = Any amino acid
  VARIANT 66: note = Any amino acid
  VARIANT 67: note = Any amino acid
  VARIANT 68: note = Any amino acid
  VARIANT 69: note = Any amino acid
  VARIANT 70: note = Any amino acid
  VARIANT 71: note = Any amino acid
  VARIANT 72: note = Any amino acid
  VARIANT 73: note = Any amino acid
  VARIANT 74: note = Any amino acid
  VARIANT 75: note = Any amino acid
  VARIANT 76: note = Any amino acid
  VARIANT 77: note = Any amino acid
  VARIANT 78: note = Any amino acid
  VARIANT 79: note = Any amino acid
  VARIANT 80: note = Any amino acid
  VARIANT 81: note = Any amino acid
  VARIANT 82: note = Any amino acid
  VARIANT 83: note = Any amino acid
  VARIANT 85: note = Any amino acid
  VARIANT 87: note = Any amino acid
  VARIANT 88: note = Any amino acid
DXXXXXXXXXXXXXXXXXXXXXXXXXXXXXXXXXXXXXXXXXXXXXMXXXXXXXXXXXXXXXXXXXXXXXXXXXXXXXXXXXXKXDXXD

SEQ ID NO: 796624 - protein, 90 aa, unidentified
  VARIANT 2: note = Any amino acid
  VARIANT 3: note = Any amino acid
  VARIANT 4: note = Any amino acid
  VARIANT 5: note = Any amino acid
  VARIANT 6: note = Any amino acid
  VARIANT 7: note = Any amino acid
  VARIANT 8: note = Any amino acid
  VARIANT 9: note = Any amino acid
  VARIANT 10: note = Any amino acid
  VARIANT 11: note = Any amino acid
  VARIANT 12: note = Any amino acid
  VARIANT 13: note = Any amino acid
  VARIANT 14: note = Any amino acid
  VARIANT 15: note = Any amino acid
  VARIANT 16: note = Any amino acid
  VARIANT 17: note = Any amino acid
  VARIANT 18: note = Any amino acid
  VARIANT 19: note = Any amino acid
  VARIANT 20: note = Any amino acid
  VARIANT 21: note = Any amino acid
  VARIANT 22: note = Any amino acid
  VARIANT 23: note = Any amino acid
  VARIANT 24: note = Any amino acid
  VARIANT 25: note = Any amino acid
  VARIANT 26: note = Any amino acid
  VARIANT 27: note = Any amino acid
  VARIANT 28: note = Any amino acid
  VARIANT 29: note = Any amino acid
  VARIANT 30: note = Any amino acid
  VARIANT 31: note = Any amino acid
  VARIANT 32: note = Any amino acid
  VARIANT 33: note = Any amino acid
  VARIANT 34: note = Any amino acid
  VARIANT 35: note = Any amino acid
  VARIANT 36: note = Any amino acid
  VARIANT 37: note = Any amino acid
  VARIANT 38: note = Any amino acid
  VARIANT 39: note = Any amino acid
  VARIANT 40: note = Any amino acid
  VARIANT 41: note = Any amino acid
  VARIANT 42: note = Any amino acid
  VARIANT 43: note = Any amino acid
  VARIANT 44: note = Any amino acid
  VARIANT 45: note = Any amino acid
  VARIANT 46: note = Any amino acid
  VARIANT 47: note = Any amino acid
  VARIANT 48: note = Any amino acid
  VARIANT 50: note = Any amino acid
  VARIANT 51: note = Any amino acid
  VARIANT 52: note = Any amino acid
  VARIANT 53: note = Any amino acid
  VARIANT 54: note = Any amino acid
  VARIANT 55: note = Any amino acid
  VARIANT 56: note = Any amino acid
  VARIANT 57: note = Any amino acid
  VARIANT 58: note = Any amino acid
  VARIANT 59: note = Any amino acid
  VARIANT 60: note = Any amino acid
  VARIANT 61: note = Any amino acid
  VARIANT 62: note = Any amino acid
  VARIANT 63: note = Any amino acid
  VARIANT 64: note = Any amino acid
  VARIANT 65: note = Any amino acid
  VARIANT 66: note = Any amino acid
  VARIANT 67: note = Any amino acid
  VARIANT 68: note = Any amino acid
  VARIANT 69: note = Any amino acid
  VARIANT 70: note = Any amino acid
  VARIANT 71: note = Any amino acid
  VARIANT 72: note = Any amino acid
  VARIANT 73: note = Any amino acid
  VARIANT 74: note = Any amino acid
  VARIANT 75: note = Any amino acid
  VARIANT 76: note = Any amino acid
  VARIANT 77: note = Any amino acid
  VARIANT 78: note = Any amino acid
  VARIANT 79: note = Any amino acid
  VARIANT 80: note = Any amino acid
  VARIANT 81: note = Any amino acid
  VARIANT 82: note = Any amino acid
  VARIANT 83: note = Any amino acid
  VARIANT 84: note = Any amino acid
  VARIANT 86: note = Any amino acid
  VARIANT 88: note = Any amino acid
  VARIANT 89: note = Any amino acid
DXXXXXXXXXXXXXXXXXXXXXXXXXXXXXXXXXXXXXXXXXXXXXXXYXXXXXXXXXXXXXXXXXXXXXXXXXXXXXXXXXXXKXDXXD

SEQ ID NO: 796625 - protein, 95 aa, unidentified
  VARIANT 2: note = Any amino acid
  VARIANT 3: note = Any amino acid
  VARIANT 4: note = Any amino acid
  VARIANT 5: note = Any amino acid
  VARIANT 6: note = Any amino acid
  VARIANT 7: note = Any amino acid
  VARIANT 8: note = Any amino acid
  VARIANT 9: note = Any amino acid
  VARIANT 10: note = Any amino acid
  VARIANT 11: note = Any amino acid
  VARIANT 12: note = Any amino acid
  VARIANT 13: note = Any amino acid
  VARIANT 14: note = Any amino acid
  VARIANT 15: note = Any amino acid
  VARIANT 16: note = Any amino acid
  VARIANT 17: note = Any amino acid
  VARIANT 18: note = Any amino acid
  VARIANT 19: note = Any amino acid
  VARIANT 20: note = Any amino acid
  VARIANT 21: note = Any amino acid
  VARIANT 22: note = Any amino acid
  VARIANT 23: note = Any amino acid
  VARIANT 24: note = Any amino acid
  VARIANT 25: note = Any amino acid
  VARIANT 26: note = Any amino acid
  VARIANT 27: note = Any amino acid
  VARIANT 28: note = Any amino acid
  VARIANT 29: note = Any amino acid
  VARIANT 30: note = Any amino acid
  VARIANT 31: note = Any amino acid
  VARIANT 32: note = Any amino acid
  VARIANT 33: note = Any amino acid
  VARIANT 34: note = Any amino acid
  VARIANT 35: note = Any amino acid
  VARIANT 36: note = Any amino acid
  VARIANT 37: note = Any amino acid
  VARIANT 38: note = Any amino acid
  VARIANT 39: note = Any amino acid
  VARIANT 40: note = Any amino acid
  VARIANT 41: note = Any amino acid
  VARIANT 42: note = Any amino acid
  VARIANT 43: note = Any amino acid
  VARIANT 44: note = Any amino acid
  VARIANT 45: note = Any amino acid
  VARIANT 46: note = Any amino acid
  VARIANT 47: note = Any amino acid
  VARIANT 48: note = Any amino acid
  VARIANT 49: note = Any amino acid
  VARIANT 50: note = Any amino acid
  VARIANT 51: note = Any amino acid
  VARIANT 53: note = Any amino acid
  VARIANT 54: note = Any amino acid
  VARIANT 55: note = Any amino acid
  VARIANT 56: note = Any amino acid
  VARIANT 57: note = Any amino acid
  VARIANT 58: note = Any amino acid
  VARIANT 59: note = Any amino acid
  VARIANT 60: note = Any amino acid
  VARIANT 61: note = Any amino acid
  VARIANT 62: note = Any amino acid
  VARIANT 63: note = Any amino acid
  VARIANT 64: note = Any amino acid
  VARIANT 65: note = Any amino acid
  VARIANT 66: note = Any amino acid
  VARIANT 67: note = Any amino acid
  VARIANT 68: note = Any amino acid
  VARIANT 69: note = Any amino acid
  VARIANT 70: note = Any amino acid
  VARIANT 71: note = Any amino acid
  VARIANT 72: note = Any amino acid
  VARIANT 73: note = Any amino acid
  VARIANT 74: note = Any amino acid
  VARIANT 75: note = Any amino acid
  VARIANT 76: note = Any amino acid
  VARIANT 77: note = Any amino acid
  VARIANT 78: note = Any amino acid
  VARIANT 79: note = Any amino acid
  VARIANT 80: note = Any amino acid
  VARIANT 81: note = Any amino acid
  VARIANT 82: note = Any amino acid
  VARIANT 83: note = Any amino acid
  VARIANT 84: note = Any amino acid
  VARIANT 85: note = Any amino acid
  VARIANT 86: note = Any amino acid
  VARIANT 87: note = Any amino acid
  VARIANT 88: note = Any amino acid
  VARIANT 89: note = Any amino acid
  VARIANT 91: note = Any amino acid
  VARIANT 93: note = Any amino acid
  VARIANT 94: note = Any amino acid
DXXXXXXXXXXXXXXXXXXXXXXXXXXXXXXXXXXXXXXXXXXXXXXXXXXAXXXXXXXXXXXXXXXXXXXXXXXXXXXXXXXXXXXXXKXDXXD

SEQ ID NO: 796626 - protein, 88 aa, unidentified
  VARIANT 2: note = Any amino acid
  VARIANT 3: note = Any amino acid
  VARIANT 4: note = Any amino acid
  VARIANT 5: note = Any amino acid
  VARIANT 6: note = Any amino acid
  VARIANT 7: note = Any amino acid
  VARIANT 8: note = Any amino acid
  VARIANT 9: note = Any amino acid
  VARIANT 10: note = Any amino acid
  VARIANT 11: note = Any amino acid
  VARIANT 12: note = Any amino acid
  VARIANT 13: note = Any amino acid
  VARIANT 14: note = Any amino acid
  VARIANT 15: note = Any amino acid
  VARIANT 16: note = Any amino acid
  VARIANT 17: note = Any amino acid
  VARIANT 18: note = Any amino acid
  VARIANT 19: note = Any amino acid
  VARIANT 20: note = Any amino acid
  VARIANT 21: note = Any amino acid
  VARIANT 22: note = Any amino acid
  VARIANT 23: note = Any amino acid
  VARIANT 24: note = Any amino acid
  VARIANT 25: note = Any amino acid
  VARIANT 26: note = Any amino acid
  VARIANT 27: note = Any amino acid
  VARIANT 28: note = Any amino acid
  VARIANT 29: note = Any amino acid
  VARIANT 30: note = Any amino acid
  VARIANT 31: note = Any amino acid
  VARIANT 32: note = Any amino acid
  VARIANT 33: note = Any amino acid
  VARIANT 34: note = Any amino acid
  VARIANT 35: note = Any amino acid
  VARIANT 36: note = Any amino acid
  VARIANT 37: note = Any amino acid
  VARIANT 38: note = Any amino acid
  VARIANT 39: note = Any amino acid
  VARIANT 40: note = Any amino acid
  VARIANT 41: note = Any amino acid
  VARIANT 42: note = Any amino acid
  VARIANT 43: note = Any amino acid
  VARIANT 44: note = Any amino acid
  VARIANT 45: note = Any amino acid
  VARIANT 47: note = Any amino acid
  VARIANT 48: note = Any amino acid
  VARIANT 49: note = Any amino acid
  VARIANT 50: note = Any amino acid
  VARIANT 51: note = Any amino acid
  VARIANT 52: note = Any amino acid
  VARIANT 53: note = Any amino acid
  VARIANT 54: note = Any amino acid
  VARIANT 55: note = Any amino acid
  VARIANT 56: note = Any amino acid
  VARIANT 57: note = Any amino acid
  VARIANT 58: note = Any amino acid
  VARIANT 59: note = Any amino acid
  VARIANT 60: note = Any amino acid
  VARIANT 61: note = Any amino acid
  VARIANT 62: note = Any amino acid
  VARIANT 63: note = Any amino acid
  VARIANT 64: note = Any amino acid
  VARIANT 65: note = Any amino acid
  VARIANT 66: note = Any amino acid
  VARIANT 67: note = Any amino acid
  VARIANT 68: note = Any amino acid
  VARIANT 69: note = Any amino acid
  VARIANT 70: note = Any amino acid
  VARIANT 71: note = Any amino acid
  VARIANT 72: note = Any amino acid
  VARIANT 73: note = Any amino acid
  VARIANT 74: note = Any amino acid
  VARIANT 75: note = Any amino acid
  VARIANT 76: note = Any amino acid
  VARIANT 77: note = Any amino acid
  VARIANT 78: note = Any amino acid
  VARIANT 79: note = Any amino acid
  VARIANT 80: note = Any amino acid
  VARIANT 81: note = Any amino acid
  VARIANT 82: note = Any amino acid
  VARIANT 84: note = Any amino acid
  VARIANT 86: note = Any amino acid
  VARIANT 87: note = Any amino acid
DXXXXXXXXXXXXXXXXXXXXXXXXXXXXXXXXXXXXXXXXXXXXSXXXXXXXXXXXXXXXXXXXXXXXXXXXXXXXXXXXXKXDXXD

SEQ ID NO: 796627 - protein, 91 aa, unidentified
  VARIANT 2: note = Any amino acid
  VARIANT 3: note = Any amino acid
  VARIANT 4: note = Any amino acid
  VARIANT 5: note = Any amino acid
  VARIANT 6: note = Any amino acid
  VARIANT 7: note = Any amino acid
  VARIANT 8: note = Any amino acid
  VARIANT 9: note = Any amino acid
  VARIANT 10: note = Any amino acid
  VARIANT 11: note = Any amino acid
  VARIANT 12: note = Any amino acid
  VARIANT 13: note = Any amino acid
  VARIANT 14: note = Any amino acid
  VARIANT 15: note = Any amino acid
  VARIANT 16: note = Any amino acid
  VARIANT 17: note = Any amino acid
  VARIANT 18: note = Any amino acid
  VARIANT 19: note = Any amino acid
  VARIANT 20: note = Any amino acid
  VARIANT 21: note = Any amino acid
  VARIANT 22: note = Any amino acid
  VARIANT 23: note = Any amino acid
  VARIANT 24: note = Any amino acid
  VARIANT 25: note = Any amino acid
  VARIANT 26: note = Any amino acid
  VARIANT 27: note = Any amino acid
  VARIANT 28: note = Any amino acid
  VARIANT 29: note = Any amino acid
  VARIANT 30: note = Any amino acid
  VARIANT 31: note = Any amino acid
  VARIANT 32: note = Any amino acid
  VARIANT 33: note = Any amino acid
  VARIANT 34: note = Any amino acid
  VARIANT 35: note = Any amino acid
  VARIANT 36: note = Any amino acid
  VARIANT 37: note = Any amino acid
  VARIANT 38: note = Any amino acid
  VARIANT 39: note = Any amino acid
  VARIANT 40: note = Any amino acid
  VARIANT 41: note = Any amino acid
  VARIANT 42: note = Any amino acid
  VARIANT 43: note = Any amino acid
  VARIANT 44: note = Any amino acid
  VARIANT 45: note = Any amino acid
  VARIANT 46: note = Any amino acid
  VARIANT 48: note = Any amino acid
  VARIANT 49: note = Any amino acid
  VARIANT 50: note = Any amino acid
  VARIANT 51: note = Any amino acid
  VARIANT 52: note = Any amino acid
  VARIANT 53: note = Any amino acid
  VARIANT 54: note = Any amino acid
  VARIANT 55: note = Any amino acid
  VARIANT 56: note = Any amino acid
  VARIANT 57: note = Any amino acid
  VARIANT 58: note = Any amino acid
  VARIANT 59: note = Any amino acid
  VARIANT 60: note = Any amino acid
  VARIANT 61: note = Any amino acid
  VARIANT 62: note = Any amino acid
  VARIANT 63: note = Any amino acid
  VARIANT 64: note = Any amino acid
  VARIANT 65: note = Any amino acid
  VARIANT 66: note = Any amino acid
  VARIANT 67: note = Any amino acid
  VARIANT 68: note = Any amino acid
  VARIANT 69: note = Any amino acid
  VARIANT 70: note = Any amino acid
  VARIANT 71: note = Any amino acid
  VARIANT 72: note = Any amino acid
  VARIANT 73: note = Any amino acid
  VARIANT 74: note = Any amino acid
  VARIANT 75: note = Any amino acid
  VARIANT 76: note = Any amino acid
  VARIANT 77: note = Any amino acid
  VARIANT 78: note = Any amino acid
  VARIANT 79: note = Any amino acid
  VARIANT 80: note = Any amino acid
  VARIANT 81: note = Any amino acid
  VARIANT 82: note = Any amino acid
  VARIANT 83: note = Any amino acid
  VARIANT 84: note = Any amino acid
  VARIANT 85: note = Any amino acid
  VARIANT 87: note = Any amino acid
  VARIANT 89: note = Any amino acid
  VARIANT 90: note = Any amino acid
DXXXXXXXXXXXXXXXXXXXXXXXXXXXXXXXXXXXXXXXXXXXXXAXXXXXXXXXXXXXXXXXXXXXXXXXXXXXXXXXXXXXXKXDXXD

SEQ ID NO: 796628 - protein, 5 aa, unidentified
GIDLH

SEQ ID NO: 796629 - protein, 5 aa, unidentified
AIDLG

SEQ ID NO: 796630 - protein, 5 aa, unidentified
GCDFH

SEQ ID NO: 796631 - protein, 5 aa, unidentified
GLDAH

SEQ ID NO: 796632 - protein, 5 aa, unidentified
GLDLS

SEQ ID NO: 796633 - protein, 5 aa, unidentified
GCDLH

SEQ ID NO: 796634 - protein, 5 aa, unidentified
AVDLA

SEQ ID NO: 796635 - protein, 5 aa, unidentified
GLDYH

SEQ ID NO: 796636 - protein, 5 aa, unidentified
GFDVH

SEQ ID NO: 796637 - protein, 5 aa, unidentified
GMDLG

SEQ ID NO: 796638 - protein, 5 aa, unidentified
GVDFH

SEQ ID NO: 796639 - protein, 5 aa, unidentified
AIDLA

SEQ ID NO: 796640 - protein, 5 aa, unidentified
GIDQH

SEQ ID NO: 796641 - protein, 5 aa, unidentified
GMDTS

SEQ ID NO: 796642 - protein, 5 aa, unidentified
GMDLH

SEQ ID NO: 796643 - protein, 5 aa, unidentified
GLDVD

SEQ ID NO: 796644 - protein, 5 aa, unidentified
GIDYH

SEQ ID NO: 796645 - protein, 5 aa, unidentified
GVDYH

SEQ ID NO: 796646 - protein, 5 aa, unidentified
GCDAH

SEQ ID NO: 796647 - protein, 5 aa, unidentified
GCDYH

SEQ ID NO: 796648 - protein, 5 aa, unidentified
GLDTH

SEQ ID NO: 796649 - protein, 5 aa, unidentified
AIDLH

SEQ ID NO: 796650 - protein, 5 aa, unidentified
ALDLG

SEQ ID NO: 796651 - protein, 5 aa, unidentified
GLDTS

SEQ ID NO: 796652 - protein, 5 aa, unidentified
GLDTA

SEQ ID NO: 796653 - protein, 5 aa, unidentified
AIDQH

SEQ ID NO: 796654 - protein, 5 aa, unidentified
GIDFH

SEQ ID NO: 796655 - protein, 5 aa, unidentified
AIDTS

SEQ ID NO: 796656 - protein, 5 aa, unidentified
GMDAH

SEQ ID NO: 796657 - protein, 5 aa, unidentified
GLDQH

SEQ ID NO: 796658 - protein, 5 aa, unidentified
GADLH

SEQ ID NO: 796659 - protein, 5 aa, unidentified
GIDHH

SEQ ID NO: 796660 - protein, 5 aa, unidentified
GCDVH

SEQ ID NO: 796661 - protein, 5 aa, unidentified
AMDTH

SEQ ID NO: 796662 - protein, 5 aa, unidentified
GCDLG

SEQ ID NO: 796663 - protein, 5 aa, unidentified
GVDTS

SEQ ID NO: 796664 - protein, 5 aa, unidentified
GFDID

SEQ ID NO: 796665 - protein, 5 aa, unidentified
ALDIH

SEQ ID NO: 796666 - protein, 5 aa, unidentified
SIDLA

SEQ ID NO: 796667 - protein, 5 aa, unidentified
GMDIA

SEQ ID NO: 796668 - protein, 5 aa, unidentified
GVDIH

SEQ ID NO: 796669 - protein, 5 aa, unidentified
GIDMH

SEQ ID NO: 796670 - protein, 5 aa, unidentified
GFDLH

SEQ ID NO: 796671 - protein, 5 aa, unidentified
GMDVD

SEQ ID NO: 796672 - protein, 5 aa, unidentified
AFDTS

SEQ ID NO: 796673 - protein, 5 aa, unidentified
GIDDH

SEQ ID NO: 796674 - protein, 5 aa, unidentified
GLDMH

SEQ ID NO: 796675 - protein, 5 aa, unidentified
AVDIA

SEQ ID NO: 796676 - protein, 5 aa, unidentified
GFDIH

SEQ ID NO: 796677 - protein, 5 aa, unidentified
GLDCH

SEQ ID NO: 796678 - protein, 5 aa, unidentified
GVDHH

SEQ ID NO: 796679 - protein, 5 aa, unidentified
GMDTH

SEQ ID NO: 796680 - protein, 5 aa, unidentified
AIDWS

SEQ ID NO: 796681 - protein, 5 aa, unidentified
AMDVH

SEQ ID NO: 796682 - protein, 5 aa, unidentified
ALDAH

SEQ ID NO: 796683 - protein, 5 aa, unidentified
ALDLH

SEQ ID NO: 796684 - protein, 5 aa, unidentified
GLDTD

SEQ ID NO: 796685 - protein, 5 aa, unidentified
AIDIH

SEQ ID NO: 796686 - protein, 5 aa, unidentified
GMDMG

SEQ ID NO: 796687 - protein, 5 aa, unidentified
GFDLA

SEQ ID NO: 796688 - protein, 5 aa, unidentified
GFDIA

SEQ ID NO: 796689 - protein, 5 aa, unidentified
ALDDS

SEQ ID NO: 796690 - protein, 5 aa, unidentified
GVDTA

SEQ ID NO: 796691 - protein, 5 aa, unidentified
GIDRH

SEQ ID NO: 796692 - protein, 5 aa, unidentified
GLDGH

SEQ ID NO: 796693 - protein, 5 aa, unidentified
ALDWS

SEQ ID NO: 796694 - protein, 5 aa, unidentified
GCDSH

SEQ ID NO: 796695 - protein, 5 aa, unidentified
ALDLA

SEQ ID NO: 796696 - protein, 5 aa, unidentified
YEAGP

SEQ ID NO: 796697 - protein, 5 aa, unidentified
MEACA

SEQ ID NO: 796698 - protein, 5 aa, unidentified
VYEAG

SEQ ID NO: 796699 - protein, 5 aa, unidentified
CYEAG

SEQ ID NO: 796700 - protein, 5 aa, unidentified
MEACS

SEQ ID NO: 796701 - protein, 5 aa, unidentified
LEACG

SEQ ID NO: 796702 - protein, 5 aa, unidentified
IEACG

SEQ ID NO: 796703 - protein, 5 aa, unidentified
AYEAG

SEQ ID NO: 796704 - protein, 5 aa, unidentified
LEVGT

SEQ ID NO: 796705 - protein, 5 aa, unidentified
LEATT

SEQ ID NO: 796706 - protein, 5 aa, unidentified
IEACA

SEQ ID NO: 796707 - protein, 5 aa, unidentified
IQEAG

SEQ ID NO: 796708 - protein, 5 aa, unidentified
CGYEA

SEQ ID NO: 796709 - protein, 5 aa, unidentified
VVEST

SEQ ID NO: 796710 - protein, 5 aa, unidentified
MEATL

SEQ ID NO: 796711 - protein, 5 aa, unidentified
YEASG

SEQ ID NO: 796712 - protein, 5 aa, unidentified
MEACC

SEQ ID NO: 796713 - protein, 5 aa, unidentified
LEATY

SEQ ID NO: 796714 - protein, 5 aa, unidentified
LEAST

SEQ ID NO: 796715 - protein, 5 aa, unidentified
LEAGT

SEQ ID NO: 796716 - protein, 5 aa, unidentified
VESTY

SEQ ID NO: 796717 - protein, 5 aa, unidentified
IEVGT

SEQ ID NO: 796718 - protein, 5 aa, unidentified
LEACA

SEQ ID NO: 796719 - protein, 5 aa, unidentified
LEACS

SEQ ID NO: 796720 - protein, 5 aa, unidentified
YEACG

SEQ ID NO: 796721 - protein, 5 aa, unidentified
IEAGT

SEQ ID NO: 796722 - protein, 5 aa, unidentified
VEATA

SEQ ID NO: 796723 - protein, 5 aa, unidentified
IEAST

SEQ ID NO: 796724 - protein, 5 aa, unidentified
IAVES

SEQ ID NO: 796725 - protein, 5 aa, unidentified
SCYEA

SEQ ID NO: 796726 - protein, 5 aa, unidentified
FEACG

SEQ ID NO: 796727 - protein, 5 aa, unidentified
MESCG

SEQ ID NO: 796728 - protein, 5 aa, unidentified
MEVGT

SEQ ID NO: 796729 - protein, 5 aa, unidentified
VVVES

SEQ ID NO: 796730 - protein, 5 aa, unidentified
MEACP

SEQ ID NO: 796731 - protein, 5 aa, unidentified
YEASC

SEQ ID NO: 796732 - protein, 6 aa, unidentified
  VARIANT 5: note = Any amino acid
VAYEXG

SEQ ID NO: 796733 - protein, 5 aa, unidentified
MEATI

SEQ ID NO: 796734 - protein, 5 aa, unidentified
VFETG

SEQ ID NO: 796735 - protein, 5 aa, unidentified
IYEAG

SEQ ID NO: 796736 - protein, 6 aa, unidentified
  VARIANT 5: note = Any amino acid
VAFEXG

SEQ ID NO: 796737 - protein, 5 aa, unidentified
IESMN

SEQ ID NO: 796738 - protein, 5 aa, unidentified
LEAGP

SEQ ID NO: 796739 - protein, 5 aa, unidentified
VAVES

SEQ ID NO: 796740 - protein, 5 aa, unidentified
IEACS

SEQ ID NO: 796741 - protein, 5 aa, unidentified
VEACG

SEQ ID NO: 796742 - protein, 5 aa, unidentified
FEEGT

SEQ ID NO: 796743 - protein, 6 aa, unidentified
  VARIANT 5: note = Any amino acid
CGYEXG

SEQ ID NO: 796744 - protein, 5 aa, unidentified
IEETT

SEQ ID NO: 796745 - protein, 5 aa, unidentified
LEVCG

SEQ ID NO: 796746 - protein, 5 aa, unidentified
IESMT

SEQ ID NO: 796747 - protein, 5 aa, unidentified
LEATR

SEQ ID NO: 796748 - protein, 5 aa, unidentified
MEACY

SEQ ID NO: 796749 - protein, 6 aa, unidentified
  VARIANT 5: note = Any amino acid
SCYEXG

SEQ ID NO: 796750 - protein, 5 aa, unidentified
VEVCG

SEQ ID NO: 796751 - protein, 5 aa, unidentified
IEACC

SEQ ID NO: 796752 - protein, 5 aa, unidentified
MEAGT

SEQ ID NO: 796753 - protein, 5 aa, unidentified
TFEEG

SEQ ID NO: 796754 - protein, 5 aa, unidentified
VEAST

SEQ ID NO: 796755 - protein, 5 aa, unidentified
IVVES

SEQ ID NO: 796756 - protein, 5 aa, unidentified
MEATM

SEQ ID NO: 796757 - protein, 5 aa, unidentified
LEAGN

SEQ ID NO: 796758 - protein, 5 aa, unidentified
MYEAG

SEQ ID NO: 796759 - protein, 5 aa, unidentified
VYESG

SEQ ID NO: 796760 - protein, 5 aa, unidentified
LEMTT

SEQ ID NO: 796761 - protein, 5 aa, unidentified
VEACT

SEQ ID NO: 796762 - protein, 5 aa, unidentified
IEACT

SEQ ID NO: 796763 - protein, 5 aa, unidentified
VLETG

SEQ ID NO: 796764 - protein, 5 aa, unidentified
FEETT

SEQ ID NO: 796765 - protein, 5 aa, unidentified
VEATY

SEQ ID NO: 796766 - protein, 5 aa, unidentified
MEACT

SEQ ID NO: 796767 - protein, 5 aa, unidentified
VEATI

SEQ ID NO: 796768 - protein, 6 aa, unidentified
  VARIANT 5: note = Any amino acid
SAYEXG

SEQ ID NO: 796769 - protein, 5 aa, unidentified
VEGCT

SEQ ID NO: 796770 - protein, 5 aa, unidentified
GHEAG

SEQ ID NO: 796771 - protein, 5 aa, unidentified
MESTT

SEQ ID NO: 796772 - protein, 5 aa, unidentified
FAYEA

SEQ ID NO: 796773 - protein, 5 aa, unidentified
LCYEA

SEQ ID NO: 796774 - protein, 5 aa, unidentified
IEACR

SEQ ID NO: 796775 - protein, 5 aa, unidentified
VETVG

SEQ ID NO: 796776 - protein, 5 aa, unidentified
IEATY

SEQ ID NO: 796777 - protein, 5 aa, unidentified
LVVES

SEQ ID NO: 796778 - protein, 5 aa, unidentified
IEACP

SEQ ID NO: 796779 - protein, 5 aa, unidentified
LEAGG

SEQ ID NO: 796780 - protein, 5 aa, unidentified
MEACV

SEQ ID NO: 796781 - protein, 5 aa, unidentified
AVEST

SEQ ID NO: 796782 - protein, 5 aa, unidentified
LEATL

SEQ ID NO: 796783 - protein, 5 aa, unidentified
VEATT

SEQ ID NO: 796784 - protein, 5 aa, unidentified
GLEAG

SEQ ID NO: 796785 - protein, 5 aa, unidentified
FEASC

SEQ ID NO: 796786 - protein, 5 aa, unidentified
LEGCT

SEQ ID NO: 796787 - protein, 6 aa, unidentified
  VARIANT 5: note = Any amino acid
LAYEXG

SEQ ID NO: 796788 - protein, 5 aa, unidentified
FEISG

SEQ ID NO: 796789 - protein, 5 aa, unidentified
MEATR

SEQ ID NO: 796790 - protein, 5 aa, unidentified
GCECM

SEQ ID NO: 796791 - protein, 5 aa, unidentified
VETTG

SEQ ID NO: 796792 - protein, 5 aa, unidentified
YEASS

SEQ ID NO: 796793 - protein, 6 aa, unidentified
  VARIANT 5: note = Any amino acid
CAYEXG

SEQ ID NO: 796794 - protein, 5 aa, unidentified
LEAGA

SEQ ID NO: 796795 - protein, 5 aa, unidentified
MESCS

SEQ ID NO: 796796 - protein, 5 aa, unidentified
MEASS

SEQ ID NO: 796797 - protein, 5 aa, unidentified
VETCA

SEQ ID NO: 796798 - protein, 5 aa, unidentified
LESTT

SEQ ID NO: 796799 - protein, 5 aa, unidentified
IEASS

SEQ ID NO: 796800 - protein, 5 aa, unidentified
MEACL

SEQ ID NO: 796801 - protein, 5 aa, unidentified
LESVG

SEQ ID NO: 796802 - protein, 5 aa, unidentified
VEVTG

SEQ ID NO: 796803 - protein, 5 aa, unidentified
VHESG

SEQ ID NO: 796804 - protein, 5 aa, unidentified
LESGP

SEQ ID NO: 796805 - protein, 5 aa, unidentified
VEATR

SEQ ID NO: 796806 - protein, 5 aa, unidentified
AAECM

SEQ ID NO: 796807 - protein, 5 aa, unidentified
MEAGS

SEQ ID NO: 796808 - protein, 5 aa, unidentified
FEAST

SEQ ID NO: 796809 - protein, 5 aa, unidentified
VEAVG

SEQ ID NO: 796810 - protein, 5 aa, unidentified
IESST

SEQ ID NO: 796811 - protein, 5 aa, unidentified
MESCA

SEQ ID NO: 796812 - protein, 5 aa, unidentified
IEAGG

SEQ ID NO: 796813 - protein, 5 aa, unidentified
IEATT

SEQ ID NO: 796814 - protein, 5 aa, unidentified
LETCA

SEQ ID NO: 796815 - protein, 5 aa, unidentified
MEGCG

SEQ ID NO: 796816 - protein, 5 aa, unidentified
VEASS

SEQ ID NO: 796817 - protein, 5 aa, unidentified
FEACR

SEQ ID NO: 796818 - protein, 5 aa, unidentified
IEAGN

SEQ ID NO: 796819 - protein, 5 aa, unidentified
IEASA

SEQ ID NO: 796820 - protein, 5 aa, unidentified
LEATF

SEQ ID NO: 796821 - protein, 5 aa, unidentified
VEMMS

SEQ ID NO: 796822 - protein, 5 aa, unidentified
AYESG

SEQ ID NO: 796823 - protein, 5 aa, unidentified
IESVG

SEQ ID NO: 796824 - protein, 5 aa, unidentified
LAVES

SEQ ID NO: 796825 - protein, 5 aa, unidentified
LEVST

SEQ ID NO: 796826 - protein, 5 aa, unidentified
IEACL

SEQ ID NO: 796827 - protein, 5 aa, unidentified
VEACS

SEQ ID NO: 796828 - protein, 5 aa, unidentified
TYEAG

SEQ ID NO: 796829 - protein, 5 aa, unidentified
FEACS

SEQ ID NO: 796830 - protein, 5 aa, unidentified
IEVGA

SEQ ID NO: 796831 - protein, 5 aa, unidentified
MEATT

SEQ ID NO: 796832 - protein, 5 aa, unidentified
VYEAS

SEQ ID NO: 796833 - protein, 5 aa, unidentified
LEEGT

SEQ ID NO: 796834 - protein, 5 aa, unidentified
LESST

SEQ ID NO: 796835 - protein, 5 aa, unidentified
LYEAG

SEQ ID NO: 796836 - protein, 5 aa, unidentified
VEACA

SEQ ID NO: 796837 - protein, 6 aa, unidentified
  VARIANT 5: note = Any amino acid
CCFEXG

SEQ ID NO: 796838 - protein, 5 aa, unidentified
MEAST

SEQ ID NO: 796839 - protein, 5 aa, unidentified
FEAGN

SEQ ID NO: 796840 - protein, 5 aa, unidentified
CCYEA

SEQ ID NO: 796841 - protein, 6 aa, unidentified
  VARIANT 5: note = Any amino acid
CCYEXG

SEQ ID NO: 796842 - protein, 5 aa, unidentified
LETVG

SEQ ID NO: 796843 - protein, 5 aa, unidentified
YESGP

SEQ ID NO: 796844 - protein, 5 aa, unidentified
LETGT

SEQ ID NO: 796845 - protein, 5 aa, unidentified
VEALG

SEQ ID NO: 796846 - protein, 5 aa, unidentified
VESTM

SEQ ID NO: 796847 - protein, 5 aa, unidentified
FEAGP

SEQ ID NO: 796848 - protein, 5 aa, unidentified
IEATC

SEQ ID NO: 796849 - protein, 5 aa, unidentified
LEGTF

SEQ ID NO: 796850 - protein, 5 aa, unidentified
IESCC

SEQ ID NO: 796851 - protein, 6 aa, unidentified
  VARIANT 5: note = Any amino acid
FAYEXS

SEQ ID NO: 796852 - protein, 6 aa, unidentified
  VARIANT 5: note = Any amino acid
VCYEXG

SEQ ID NO: 796853 - protein, 5 aa, unidentified
VEVGT

SEQ ID NO: 796854 - protein, 5 aa, unidentified
FEACA

SEQ ID NO: 796855 - protein, 5 aa, unidentified
IEATA

SEQ ID NO: 796856 - protein, 5 aa, unidentified
IEATI

SEQ ID NO: 796857 - protein, 5 aa, unidentified
IESTT

SEQ ID NO: 796858 - protein, 5 aa, unidentified
LEAGS

SEQ ID NO: 796859 - protein, 5 aa, unidentified
IESSS

SEQ ID NO: 796860 - protein, 6 aa, unidentified
  VARIANT 5: note = Any amino acid
FAYEXG

SEQ ID NO: 796861 - protein, 5 aa, unidentified
GLETG

SEQ ID NO: 796862 - protein, 5 aa, unidentified
IEAGM

SEQ ID NO: 796863 - protein, 6 aa, unidentified
  VARIANT 5: note = Any amino acid
MAYEXS

SEQ ID NO: 796864 - protein, 5 aa, unidentified
FEAGT

SEQ ID NO: 796865 - protein, 5 aa, unidentified
IHEAG

SEQ ID NO: 796866 - protein, 5 aa, unidentified
YEAST

SEQ ID NO: 796867 - protein, 5 aa, unidentified
LESGS

SEQ ID NO: 796868 - protein, 5 aa, unidentified
VCYEA

SEQ ID NO: 796869 - protein, 5 aa, unidentified
VIEEG

SEQ ID NO: 796870 - protein, 6 aa, unidentified
  VARIANT 5: note = Any amino acid
FCYEXG

SEQ ID NO: 796871 - protein, 5 aa, unidentified
FEAAY

SEQ ID NO: 796872 - protein, 5 aa, unidentified
LEACT

SEQ ID NO: 796873 - protein, 5 aa, unidentified
LECGT

SEQ ID NO: 796874 - protein, 5 aa, unidentified
VAYEA

SEQ ID NO: 796875 - protein, 5 aa, unidentified
VEAGT

SEQ ID NO: 796876 - protein, 5 aa, unidentified
VESMN

SEQ ID NO: 796877 - protein, 5 aa, unidentified
VETIG

SEQ ID NO: 796878 - protein, 5 aa, unidentified
LESTY

SEQ ID NO: 796879 - protein, 5 aa, unidentified
LETTT

SEQ ID NO: 796880 - protein, 5 aa, unidentified
MAIVE

SEQ ID NO: 796881 - protein, 5 aa, unidentified
METCG

SEQ ID NO: 796882 - protein, 5 aa, unidentified
VESVG

SEQ ID NO: 796883 - protein, 5 aa, unidentified
ACECM

SEQ ID NO: 796884 - protein, 5 aa, unidentified
FEVGT

SEQ ID NO: 796885 - protein, 5 aa, unidentified
IEAVG

SEQ ID NO: 796886 - protein, 5 aa, unidentified
IENST

SEQ ID NO: 796887 - protein, 5 aa, unidentified
IESCS

SEQ ID NO: 796888 - protein, 6 aa, unidentified
  VARIANT 5: note = Any amino acid
TAYEXG

SEQ ID NO: 796889 - protein, 5 aa, unidentified
IEACN

SEQ ID NO: 796890 - protein, 5 aa, unidentified
IEATF

SEQ ID NO: 796891 - protein, 5 aa, unidentified
IESMS

SEQ ID NO: 796892 - protein, 5 aa, unidentified
IETGT

SEQ ID NO: 796893 - protein, 5 aa, unidentified
LEACP

SEQ ID NO: 796894 - protein, 5 aa, unidentified
LEATM

SEQ ID NO: 796895 - protein, 5 aa, unidentified
MESGT

SEQ ID NO: 796896 - protein, 5 aa, unidentified
FEICS

SEQ ID NO: 796897 - protein, 5 aa, unidentified
IEAGA

SEQ ID NO: 796898 - protein, 5 aa, unidentified
IESCG

SEQ ID NO: 796899 - protein, 5 aa, unidentified
LEACY

SEQ ID NO: 796900 - protein, 5 aa, unidentified
MAYEA

SEQ ID NO: 796901 - protein, 5 aa, unidentified
METCS

SEQ ID NO: 796902 - protein, 5 aa, unidentified
VEACP

SEQ ID NO: 796903 - protein, 5 aa, unidentified
FEECE

SEQ ID NO: 796904 - protein, 5 aa, unidentified
IEVGG

SEQ ID NO: 796905 - protein, 5 aa, unidentified
LETGP

SEQ ID NO: 796906 - protein, 5 aa, unidentified
MEASN

SEQ ID NO: 796907 - protein, 5 aa, unidentified
METGT

SEQ ID NO: 796908 - protein, 5 aa, unidentified
CAECM

SEQ ID NO: 796909 - protein, 5 aa, unidentified
IEMTT

SEQ ID NO: 796910 - protein, 5 aa, unidentified
LEGTT

SEQ ID NO: 796911 - protein, 5 aa, unidentified
MEAVG

SEQ ID NO: 796912 - protein, 5 aa, unidentified
METCA

SEQ ID NO: 796913 - protein, 5 aa, unidentified
METGP

SEQ ID NO: 796914 - protein, 5 aa, unidentified
MEVGA

SEQ ID NO: 796915 - protein, 5 aa, unidentified
VEAGG

SEQ ID NO: 796916 - protein, 5 aa, unidentified
FEATY

SEQ ID NO: 796917 - protein, 5 aa, unidentified
LEACC

SEQ ID NO: 796918 - protein, 5 aa, unidentified
LEATI

SEQ ID NO: 796919 - protein, 5 aa, unidentified
LEETT

SEQ ID NO: 796920 - protein, 5 aa, unidentified
MEAGG

SEQ ID NO: 796921 - protein, 5 aa, unidentified
SAYEA

SEQ ID NO: 796922 - protein, 5 aa, unidentified
IEATR

SEQ ID NO: 796923 - protein, 5 aa, unidentified
IEICS

SEQ ID NO: 796924 - protein, 5 aa, unidentified
LESGT

SEQ ID NO: 796925 - protein, 5 aa, unidentified
LETSG

SEQ ID NO: 796926 - protein, 5 aa, unidentified
FEASR

SEQ ID NO: 796927 - protein, 5 aa, unidentified
IEVGP

SEQ ID NO: 796928 - protein, 5 aa, unidentified
LESCG

SEQ ID NO: 796929 - protein, 5 aa, unidentified
VESTT

SEQ ID NO: 796930 - protein, 5 aa, unidentified
VLEAG

SEQ ID NO: 796931 - protein, 5 aa, unidentified
LEAGR

SEQ ID NO: 796932 - protein, 6 aa, unidentified
  VARIANT 5: note = Any amino acid
LTYEXG

SEQ ID NO: 796933 - protein, 5 aa, unidentified
MAVES

SEQ ID NO: 796934 - protein, 5 aa, unidentified
MEASC

SEQ ID NO: 796935 - protein, 5 aa, unidentified
VEAMG

SEQ ID NO: 796936 - protein, 5 aa, unidentified
VEMTT

SEQ ID NO: 796937 - protein, 5 aa, unidentified
VYETG

SEQ ID NO: 796938 - protein, 5 aa, unidentified
GAECM

SEQ ID NO: 796939 - protein, 5 aa, unidentified
GYEAG

SEQ ID NO: 796940 - protein, 5 aa, unidentified
IESCR

SEQ ID NO: 796941 - protein, 5 aa, unidentified
LAYEA

SEQ ID NO: 796942 - protein, 5 aa, unidentified
LEASS

SEQ ID NO: 796943 - protein, 5 aa, unidentified
VESMT

SEQ ID NO: 796944 - protein, 5 aa, unidentified
CFEAG

SEQ ID NO: 796945 - protein, 5 aa, unidentified
IEAGS

SEQ ID NO: 796946 - protein, 5 aa, unidentified
IETVG

SEQ ID NO: 796947 - protein, 5 aa, unidentified
LETSA

SEQ ID NO: 796948 - protein, 5 aa, unidentified
QESTT

SEQ ID NO: 796949 - protein, 5 aa, unidentified
YESCA

SEQ ID NO: 796950 - protein, 5 aa, unidentified
YMEEG

SEQ ID NO: 796951 - protein, 5 aa, unidentified
GFEAG

SEQ ID NO: 796952 - protein, 5 aa, unidentified
IEACW

SEQ ID NO: 796953 - protein, 5 aa, unidentified
IETTT

SEQ ID NO: 796954 - protein, 5 aa, unidentified
LEVTT

SEQ ID NO: 796955 - protein, 5 aa, unidentified
VEAIG

SEQ ID NO: 796956 - protein, 5 aa, unidentified
VIETG

SEQ ID NO: 796957 - protein, 5 aa, unidentified
VQEAG

SEQ ID NO: 796958 - protein, 5 aa, unidentified
VYEAC

SEQ ID NO: 796959 - protein, 5 aa, unidentified
AYETG

SEQ ID NO: 796960 - protein, 5 aa, unidentified
FAVEG

SEQ ID NO: 796961 - protein, 5 aa, unidentified
IEACH

SEQ ID NO: 796962 - protein, 5 aa, unidentified
IEVGS

SEQ ID NO: 796963 - protein, 5 aa, unidentified
LEVGA

SEQ ID NO: 796964 - protein, 5 aa, unidentified
MESCP

SEQ ID NO: 796965 - protein, 5 aa, unidentified
VECTS

SEQ ID NO: 796966 - protein, 5 aa, unidentified
AGYEA

SEQ ID NO: 796967 - protein, 5 aa, unidentified
CFEEG

SEQ ID NO: 796968 - protein, 5 aa, unidentified
IEASP

SEQ ID NO: 796969 - protein, 5 aa, unidentified
LEAAT

SEQ ID NO: 796970 - protein, 5 aa, unidentified
LETSS

SEQ ID NO: 796971 - protein, 5 aa, unidentified
VEACC

SEQ ID NO: 796972 - protein, 5 aa, unidentified
VEATF

SEQ ID NO: 796973 - protein, 5 aa, unidentified
FEAGA

SEQ ID NO: 796974 - protein, 5 aa, unidentified
IEVCS

SEQ ID NO: 796975 - protein, 6 aa, unidentified
  VARIANT 5: note = Any amino acid
LCYEXG

SEQ ID NO: 796976 - protein, 5 aa, unidentified
LEVGG

SEQ ID NO: 796977 - protein, 5 aa, unidentified
LEVGP

SEQ ID NO: 796978 - protein, 5 aa, unidentified
MESST

SEQ ID NO: 796979 - protein, 5 aa, unidentified
FEVSG

SEQ ID NO: 796980 - protein, 5 aa, unidentified
IAIES

SEQ ID NO: 796981 - protein, 5 aa, unidentified
IEASC

SEQ ID NO: 796982 - protein, 5 aa, unidentified
LAVEG

SEQ ID NO: 796983 - protein, 5 aa, unidentified
LEATC

SEQ ID NO: 796984 - protein, 6 aa, unidentified
  VARIANT 5: note = Any amino acid
LEATXG

SEQ ID NO: 796985 - protein, 5 aa, unidentified
LEESQ

SEQ ID NO: 796986 - protein, 5 aa, unidentified
LEVSG

SEQ ID NO: 796987 - protein, 5 aa, unidentified
MECGT

SEQ ID NO: 796988 - protein, 5 aa, unidentified
VEASA

SEQ ID NO: 796989 - protein, 5 aa, unidentified
AAIES

SEQ ID NO: 796990 - protein, 5 aa, unidentified
CAYEA

SEQ ID NO: 796991 - protein, 5 aa, unidentified
FETGT

SEQ ID NO: 796992 - protein, 5 aa, unidentified
IEAGP

SEQ ID NO: 796993 - protein, 5 aa, unidentified
IEMMS

SEQ ID NO: 796994 - protein, 5 aa, unidentified
IESCA

SEQ ID NO: 796995 - protein, 5 aa, unidentified
IESCT

SEQ ID NO: 796996 - protein, 5 aa, unidentified
ACATA

SEQ ID NO: 796997 - protein, 5 aa, unidentified
TCYEA

SEQ ID NO: 796998 - protein, 5 aa, unidentified
VEATC

SEQ ID NO: 796999 - protein, 5 aa, unidentified
VEPSA

SEQ ID NO: 797000 - protein, 5 aa, unidentified
VETCS

SEQ ID NO: 797001 - protein, 5 aa, unidentified
VFEEG

SEQ ID NO: 797002 - protein, 5 aa, unidentified
VLEVC

SEQ ID NO: 797003 - protein, 6 aa, unidentified
  VARIANT 5: note = Any amino acid
VSYEXG

SEQ ID NO: 797004 - protein, 5 aa, unidentified
FESGS

SEQ ID NO: 797005 - protein, 5 aa, unidentified
LEASR

SEQ ID NO: 797006 - protein, 5 aa, unidentified
LEIGT

SEQ ID NO: 797007 - protein, 5 aa, unidentified
LESCT

SEQ ID NO: 797008 - protein, 5 aa, unidentified
MEAGA

SEQ ID NO: 797009 - protein, 5 aa, unidentified
MEGCT

SEQ ID NO: 797010 - protein, 5 aa, unidentified
VEACR

SEQ ID NO: 797011 - protein, 5 aa, unidentified
VEASP

SEQ ID NO: 797012 - protein, 5 aa, unidentified
VEITG

SEQ ID NO: 797013 - protein, 5 aa, unidentified
CLEEG

SEQ ID NO: 797014 - protein, 5 aa, unidentified
FEAGR

SEQ ID NO: 797015 - protein, 5 aa, unidentified
FEATF

SEQ ID NO: 797016 - protein, 5 aa, unidentified
IEATP

SEQ ID NO: 797017 - protein, 5 aa, unidentified
IESTC

SEQ ID NO: 797018 - protein, 5 aa, unidentified
NRRDA

SEQ ID NO: 797019 - protein, 5 aa, unidentified
DYNDA

SEQ ID NO: 797020 - protein, 5 aa, unidentified
DRLDT

SEQ ID NO: 797021 - protein, 5 aa, unidentified
DRIDG

SEQ ID NO: 797022 - protein, 5 aa, unidentified
DRDDA

SEQ ID NO: 797023 - protein, 5 aa, unidentified
DGNDA

SEQ ID NO: 797024 - protein, 5 aa, unidentified
DFNDA

SEQ ID NO: 797025 - protein, 5 aa, unidentified
NRLDS

SEQ ID NO: 797026 - protein, 5 aa, unidentified
DKDDA

SEQ ID NO: 797027 - protein, 5 aa, unidentified
DRLDV

SEQ ID NO: 797028 - protein, 5 aa, unidentified
DRRDV

SEQ ID NO: 797029 - protein, 5 aa, unidentified
DKLDV

SEQ ID NO: 797030 - protein, 5 aa, unidentified
DEHDA

SEQ ID NO: 797031 - protein, 5 aa, unidentified
DRIDV

SEQ ID NO: 797032 - protein, 5 aa, unidentified
DRLDG

SEQ ID NO: 797033 - protein, 5 aa, unidentified
DQNDA

SEQ ID NO: 797034 - protein, 5 aa, unidentified
DFSDA

SEQ ID NO: 797035 - protein, 5 aa, unidentified
DSNDA

SEQ ID NO: 797036 - protein, 5 aa, unidentified
DKIDG

SEQ ID NO: 797037 - protein, 5 aa, unidentified
DKWDS

SEQ ID NO: 797038 - protein, 5 aa, unidentified
DHNDA

SEQ ID NO: 797039 - protein, 5 aa, unidentified
DQHDA

SEQ ID NO: 797040 - protein, 5 aa, unidentified
DKIAA

SEQ ID NO: 797041 - protein, 5 aa, unidentified
DHSDA

SEQ ID NO: 797042 - protein, 5 aa, unidentified
DRIDL

SEQ ID NO: 797043 - protein, 5 aa, unidentified
DYSDA

SEQ ID NO: 797044 - protein, 5 aa, unidentified
DDNDA

SEQ ID NO: 797045 - protein, 5 aa, unidentified
DRNDS

SEQ ID NO: 797046 - protein, 5 aa, unidentified
DKEDS

SEQ ID NO: 797047 - protein, 5 aa, unidentified
DRYDA

SEQ ID NO: 797048 - protein, 5 aa, unidentified
DARDS

SEQ ID NO: 797049 - protein, 5 aa, unidentified
DYIDA

SEQ ID NO: 797050 - protein, 5 aa, unidentified
DRTDT

SEQ ID NO: 797051 - protein, 5 aa, unidentified
DVHDA

SEQ ID NO: 797052 - protein, 5 aa, unidentified
NKKDA

SEQ ID NO: 797053 - protein, 5 aa, unidentified
DKKAA

SEQ ID NO: 797054 - protein, 5 aa, unidentified
NRIDS

SEQ ID NO: 797055 - protein, 5 aa, unidentified
DRVDV

SEQ ID NO: 797056 - protein, 5 aa, unidentified
DAIDG

SEQ ID NO: 797057 - protein, 5 aa, unidentified
DWRDA

SEQ ID NO: 797058 - protein, 5 aa, unidentified
DSRDS

SEQ ID NO: 797059 - protein, 5 aa, unidentified
DNRDA

SEQ ID NO: 797060 - protein, 5 aa, unidentified
DRRDG

SEQ ID NO: 797061 - protein, 5 aa, unidentified
NRLDA

SEQ ID NO: 797062 - protein, 5 aa, unidentified
DLHDS

SEQ ID NO: 797063 - protein, 5 aa, unidentified
DNNDA

SEQ ID NO: 797064 - protein, 5 aa, unidentified
DGLDV

SEQ ID NO: 797065 - protein, 5 aa, unidentified
DPRDS

SEQ ID NO: 797066 - protein, 5 aa, unidentified
DRTDV

SEQ ID NO: 797067 - protein, 5 aa, unidentified
DKRDV

SEQ ID NO: 797068 - protein, 53 aa, unidentified
  VARIANT 2: note = Any amino acid
  VARIANT 3: note = Any amino acid
  VARIANT 4: note = Any amino acid
  VARIANT 5: note = Any amino acid
  VARIANT 6: note = Any amino acid
  VARIANT 7: note = Any amino acid
  VARIANT 8: note = Any amino acid
  VARIANT 9: note = Any amino acid
  VARIANT 10: note = Any amino acid
  VARIANT 11: note = Any amino acid
  VARIANT 12: note = Any amino acid
  VARIANT 13: note = Any amino acid
  VARIANT 14: note = Any amino acid
  VARIANT 15: note = Any amino acid
  VARIANT 16: note = Any amino acid
  VARIANT 17: note = Any amino acid
  VARIANT 18: note = Any amino acid
  VARIANT 19: note = Any amino acid
  VARIANT 20: note = Any amino acid
  VARIANT 21: note = Any amino acid
  VARIANT 22: note = Any amino acid
  VARIANT 23: note = Any amino acid
  VARIANT 24: note = Any amino acid
  VARIANT 25: note = Any amino acid
  VARIANT 26: note = Any amino acid
  VARIANT 27: note = Any amino acid
  VARIANT 28: note = Any amino acid
  VARIANT 29: note = Any amino acid
  VARIANT 30: note = Any amino acid
  VARIANT 32: note = Any amino acid
  VARIANT 33: note = Any amino acid
  VARIANT 34: note = Any amino acid
  VARIANT 35: note = Any amino acid
  VARIANT 36: note = Any amino acid
  VARIANT 37: note = Any amino acid
  VARIANT 38: note = Any amino acid
  VARIANT 41: note = Any amino acid
  VARIANT 42: note = Any amino acid
  VARIANT 43: note = Any amino acid
  VARIANT 44: note = Any amino acid
  VARIANT 45: note = Any amino acid
  VARIANT 46: note = Any amino acid
  VARIANT 47: note = Any amino acid
  VARIANT 48: note = Any amino acid
  VARIANT 49: note = Any amino acid
  VARIANT 50: note = Any amino acid
  VARIANT 51: note = Any amino acid
  VARIANT 52: note = Any amino acid
GXXXXXXXXXXXXXXXXXXXXXXXXXXXXXGXXXXXXXSGXXXXXXXXXXXXG

SEQ ID NO: 797069 - protein, 54 aa, unidentified
  VARIANT 2: note = Any amino acid
  VARIANT 3: note = Any amino acid
  VARIANT 4: note = Any amino acid
  VARIANT 5: note = Any amino acid
  VARIANT 6: note = Any amino acid
  VARIANT 7: note = Any amino acid
  VARIANT 8: note = Any amino acid
  VARIANT 9: note = Any amino acid
  VARIANT 10: note = Any amino acid
  VARIANT 11: note = Any amino acid
  VARIANT 12: note = Any amino acid
  VARIANT 13: note = Any amino acid
  VARIANT 14: note = Any amino acid
  VARIANT 15: note = Any amino acid
  VARIANT 16: note = Any amino acid
  VARIANT 17: note = Any amino acid
  VARIANT 18: note = Any amino acid
  VARIANT 19: note = Any amino acid
  VARIANT 20: note = Any amino acid
  VARIANT 21: note = Any amino acid
  VARIANT 22: note = Any amino acid
  VARIANT 23: note = Any amino acid
  VARIANT 24: note = Any amino acid
  VARIANT 25: note = Any amino acid
  VARIANT 26: note = Any amino acid
  VARIANT 27: note = Any amino acid
  VARIANT 28: note = Any amino acid
  VARIANT 29: note = Any amino acid
  VARIANT 30: note = Any amino acid
  VARIANT 31: note = Any amino acid
  VARIANT 33: note = Any amino acid
  VARIANT 34: note = Any amino acid
  VARIANT 35: note = Any amino acid
  VARIANT 36: note = Any amino acid
  VARIANT 37: note = Any amino acid
  VARIANT 38: note = Any amino acid
  VARIANT 39: note = Any amino acid
  VARIANT 41: note = G or A
  VARIANT 42: note = Any amino acid
  VARIANT 43: note = Any amino acid
  VARIANT 44: note = Any amino acid
  VARIANT 45: note = Any amino acid
  VARIANT 46: note = Any amino acid
  VARIANT 47: note = Any amino acid
  VARIANT 48: note = Any amino acid
  VARIANT 49: note = Any amino acid
  VARIANT 50: note = Any amino acid
  VARIANT 51: note = Any amino acid
  VARIANT 52: note = Any amino acid
  VARIANT 53: note = Any amino acid
  VARIANT 2..31: note = This region may encompass 28-30 residues
  VARIANT 42..53: note = This region may encompass 10-12 residues
GXXXXXXXXXXXXXXXXXXXXXXXXXXXXXXGXXXXXXXSXXXXXXXXXXXXXG

SEQ ID NO: 797070 - protein, 52 aa, unidentified
  VARIANT 2: note = Any amino acid
  VARIANT 3: note = Any amino acid
  VARIANT 4: note = Any amino acid
  VARIANT 5: note = Any amino acid
  VARIANT 6: note = Any amino acid
  VARIANT 7: note = Any amino acid
  VARIANT 8: note = Any amino acid
  VARIANT 9: note = Any amino acid
  VARIANT 10: note = Any amino acid
  VARIANT 11: note = Any amino acid
  VARIANT 12: note = Any amino acid
  VARIANT 13: note = Any amino acid
  VARIANT 14: note = Any amino acid
  VARIANT 15: note = Any amino acid
  VARIANT 16: note = Any amino acid
  VARIANT 17: note = Any amino acid
  VARIANT 18: note = Any amino acid
  VARIANT 19: note = Any amino acid
  VARIANT 20: note = Any amino acid
  VARIANT 21: note = Any amino acid
  VARIANT 22: note = Any amino acid
  VARIANT 23: note = Any amino acid
  VARIANT 24: note = Any amino acid
  VARIANT 25: note = Any amino acid
  VARIANT 26: note = Any amino acid
  VARIANT 27: note = Any amino acid
  VARIANT 28: note = Any amino acid
  VARIANT 29: note = Any amino acid
  VARIANT 30: note = Any amino acid
  VARIANT 31: note = Any amino acid
  VARIANT 33: note = Any amino acid
  VARIANT 34: note = Any amino acid
  VARIANT 35: note = Any amino acid
  VARIANT 36: note = Any amino acid
  VARIANT 37: note = Any amino acid
  VARIANT 38: note = Any amino acid
  VARIANT 39: note = Any amino acid
  VARIANT 42: note = Any amino acid
  VARIANT 43: note = Any amino acid
  VARIANT 44: note = Any amino acid
  VARIANT 45: note = Any amino acid
  VARIANT 46: note = Any amino acid
  VARIANT 47: note = Any amino acid
  VARIANT 48: note = Any amino acid
  VARIANT 49: note = Any amino acid
  VARIANT 50: note = Any amino acid
  VARIANT 51: note = Any amino acid
GXXXXXXXXXXXXXXXXXXXXXXXXXXXXXXGXXXXXXXSAXXXXXXXXXXG

SEQ ID NO: 797071 - protein, 51 aa, unidentified
  VARIANT 2: note = Any amino acid
  VARIANT 3: note = Any amino acid
  VARIANT 4: note = Any amino acid
  VARIANT 5: note = Any amino acid
  VARIANT 6: note = Any amino acid
  VARIANT 7: note = Any amino acid
  VARIANT 8: note = Any amino acid
  VARIANT 9: note = Any amino acid
  VARIANT 10: note = Any amino acid
  VARIANT 11: note = Any amino acid
  VARIANT 12: note = Any amino acid
  VARIANT 13: note = Any amino acid
  VARIANT 14: note = Any amino acid
  VARIANT 15: note = Any amino acid
  VARIANT 16: note = Any amino acid
  VARIANT 17: note = Any amino acid
  VARIANT 18: note = Any amino acid
  VARIANT 19: note = Any amino acid
  VARIANT 20: note = Any amino acid
  VARIANT 21: note = Any amino acid
  VARIANT 22: note = Any amino acid
  VARIANT 23: note = Any amino acid
  VARIANT 24: note = Any amino acid
  VARIANT 25: note = Any amino acid
  VARIANT 26: note = Any amino acid
  VARIANT 27: note = Any amino acid
  VARIANT 28: note = Any amino acid
  VARIANT 29: note = Any amino acid
  VARIANT 30: note = Any amino acid
  VARIANT 32: note = Any amino acid
  VARIANT 33: note = Any amino acid
  VARIANT 34: note = Any amino acid
  VARIANT 35: note = Any amino acid
  VARIANT 36: note = Any amino acid
  VARIANT 37: note = Any amino acid
  VARIANT 38: note = Any amino acid
  VARIANT 41: note = Any amino acid
  VARIANT 42: note = Any amino acid
  VARIANT 43: note = Any amino acid
  VARIANT 44: note = Any amino acid
  VARIANT 45: note = Any amino acid
  VARIANT 46: note = Any amino acid
  VARIANT 47: note = Any amino acid
  VARIANT 48: note = Any amino acid
  VARIANT 49: note = Any amino acid
  VARIANT 50: note = Any amino acid
GXXXXXXXXXXXXXXXXXXXXXXXXXXXXXGXXXXXXXSGXXXXXXXXXXG

SEQ ID NO: 797072 - protein, 52 aa, unidentified
  VARIANT 2: note = Any amino acid
  VARIANT 3: note = Any amino acid
  VARIANT 4: note = Any amino acid
  VARIANT 5: note = Any amino acid
  VARIANT 6: note = Any amino acid
  VARIANT 7: note = Any amino acid
  VARIANT 8: note = Any amino acid
  VARIANT 9: note = Any amino acid
  VARIANT 10: note = Any amino acid
  VARIANT 11: note = Any amino acid
  VARIANT 12: note = Any amino acid
  VARIANT 13: note = Any amino acid
  VARIANT 14: note = Any amino acid
  VARIANT 15: note = Any amino acid
  VARIANT 16: note = Any amino acid
  VARIANT 17: note = Any amino acid
  VARIANT 18: note = Any amino acid
  VARIANT 19: note = Any amino acid
  VARIANT 20: note = Any amino acid
  VARIANT 21: note = Any amino acid
  VARIANT 22: note = Any amino acid
  VARIANT 23: note = Any amino acid
  VARIANT 24: note = Any amino acid
  VARIANT 25: note = Any amino acid
  VARIANT 26: note = Any amino acid
  VARIANT 27: note = Any amino acid
  VARIANT 28: note = Any amino acid
  VARIANT 29: note = Any amino acid
  VARIANT 30: note = Any amino acid
  VARIANT 31: note = Any amino acid
  VARIANT 33: note = Any amino acid
  VARIANT 34: note = Any amino acid
  VARIANT 35: note = Any amino acid
  VARIANT 36: note = Any amino acid
  VARIANT 37: note = Any amino acid
  VARIANT 38: note = Any amino acid
  VARIANT 39: note = Any amino acid
  VARIANT 42: note = Any amino acid
  VARIANT 43: note = Any amino acid
  VARIANT 44: note = Any amino acid
  VARIANT 45: note = Any amino acid
  VARIANT 46: note = Any amino acid
  VARIANT 47: note = Any amino acid
  VARIANT 48: note = Any amino acid
  VARIANT 49: note = Any amino acid
  VARIANT 50: note = Any amino acid
  VARIANT 51: note = Any amino acid
GXXXXXXXXXXXXXXXXXXXXXXXXXXXXXXGXXXXXXXSGXXXXXXXXXXG

SEQ ID NO: 797073 - protein, 53 aa, unidentified
  VARIANT 2: note = Any amino acid
  VARIANT 3: note = Any amino acid
  VARIANT 4: note = Any amino acid
  VARIANT 5: note = Any amino acid
  VARIANT 6: note = Any amino acid
  VARIANT 7: note = Any amino acid
  VARIANT 8: note = Any amino acid
  VARIANT 9: note = Any amino acid
  VARIANT 10: note = Any amino acid
  VARIANT 11: note = Any amino acid
  VARIANT 12: note = Any amino acid
  VARIANT 13: note = Any amino acid
  VARIANT 14: note = Any amino acid
  VARIANT 15: note = Any amino acid
  VARIANT 16: note = Any amino acid
  VARIANT 17: note = Any amino acid
  VARIANT 18: note = Any amino acid
  VARIANT 19: note = Any amino acid
  VARIANT 20: note = Any amino acid
  VARIANT 21: note = Any amino acid
  VARIANT 22: note = Any amino acid
  VARIANT 23: note = Any amino acid
  VARIANT 24: note = Any amino acid
  VARIANT 25: note = Any amino acid
  VARIANT 26: note = Any amino acid
  VARIANT 27: note = Any amino acid
  VARIANT 28: note = Any amino acid
  VARIANT 29: note = Any amino acid
  VARIANT 30: note = Any amino acid
  VARIANT 32: note = Any amino acid
  VARIANT 33: note = Any amino acid
  VARIANT 34: note = Any amino acid
  VARIANT 35: note = Any amino acid
  VARIANT 36: note = Any amino acid
  VARIANT 37: note = Any amino acid
  VARIANT 38: note = Any amino acid
  VARIANT 41: note = Any amino acid
  VARIANT 42: note = Any amino acid
  VARIANT 43: note = Any amino acid
  VARIANT 44: note = Any amino acid
  VARIANT 45: note = Any amino acid
  VARIANT 46: note = Any amino acid
  VARIANT 47: note = Any amino acid
  VARIANT 48: note = Any amino acid
  VARIANT 49: note = Any amino acid
  VARIANT 50: note = Any amino acid
  VARIANT 51: note = Any amino acid
  VARIANT 52: note = Any amino acid
GXXXXXXXXXXXXXXXXXXXXXXXXXXXXXGXXXXXXXSGXXXXXXXXXXXXA

SEQ ID NO: 797074 - protein, 51 aa, unidentified
  VARIANT 2: note = Any amino acid
  VARIANT 3: note = Any amino acid
  VARIANT 4: note = Any amino acid
  VARIANT 5: note = Any amino acid
  VARIANT 6: note = Any amino acid
  VARIANT 7: note = Any amino acid
  VARIANT 8: note = Any amino acid
  VARIANT 9: note = Any amino acid
  VARIANT 10: note = Any amino acid
  VARIANT 11: note = Any amino acid
  VARIANT 12: note = Any amino acid
  VARIANT 13: note = Any amino acid
  VARIANT 14: note = Any amino acid
  VARIANT 15: note = Any amino acid
  VARIANT 16: note = Any amino acid
  VARIANT 17: note = Any amino acid
  VARIANT 18: note = Any amino acid
  VARIANT 19: note = Any amino acid
  VARIANT 20: note = Any amino acid
  VARIANT 21: note = Any amino acid
  VARIANT 22: note = Any amino acid
  VARIANT 23: note = Any amino acid
  VARIANT 24: note = Any amino acid
  VARIANT 25: note = Any amino acid
  VARIANT 26: note = Any amino acid
  VARIANT 27: note = Any amino acid
  VARIANT 28: note = Any amino acid
  VARIANT 29: note = Any amino acid
  VARIANT 31: note = Any amino acid
  VARIANT 32: note = Any amino acid
  VARIANT 33: note = Any amino acid
  VARIANT 34: note = Any amino acid
  VARIANT 35: note = Any amino acid
  VARIANT 36: note = Any amino acid
  VARIANT 37: note = Any amino acid
  VARIANT 40: note = Any amino acid
  VARIANT 41: note = Any amino acid
  VARIANT 42: note = Any amino acid
  VARIANT 43: note = Any amino acid
  VARIANT 44: note = Any amino acid
  VARIANT 45: note = Any amino acid
  VARIANT 46: note = Any amino acid
  VARIANT 47: note = Any amino acid
  VARIANT 48: note = Any amino acid
  VARIANT 49: note = Any amino acid
  VARIANT 50: note = Any amino acid
GXXXXXXXXXXXXXXXXXXXXXXXXXXXXGXXXXXXXSGXXXXXXXXXXXG

SEQ ID NO: 797075 - protein, 52 aa, unidentified
  VARIANT 2: note = Any amino acid
  VARIANT 3: note = Any amino acid
  VARIANT 4: note = Any amino acid
  VARIANT 5: note = Any amino acid
  VARIANT 6: note = Any amino acid
  VARIANT 7: note = Any amino acid
  VARIANT 8: note = Any amino acid
  VARIANT 9: note = Any amino acid
  VARIANT 10: note = Any amino acid
  VARIANT 11: note = Any amino acid
  VARIANT 12: note = Any amino acid
  VARIANT 13: note = Any amino acid
  VARIANT 14: note = Any amino acid
  VARIANT 15: note = Any amino acid
  VARIANT 16: note = Any amino acid
  VARIANT 17: note = Any amino acid
  VARIANT 18: note = Any amino acid
  VARIANT 19: note = Any amino acid
  VARIANT 20: note = Any amino acid
  VARIANT 21: note = Any amino acid
  VARIANT 22: note = Any amino acid
  VARIANT 23: note = Any amino acid
  VARIANT 24: note = Any amino acid
  VARIANT 25: note = Any amino acid
  VARIANT 26: note = Any amino acid
  VARIANT 27: note = Any amino acid
  VARIANT 28: note = Any amino acid
  VARIANT 29: note = Any amino acid
  VARIANT 30: note = Any amino acid
  VARIANT 31: note = Any amino acid
  VARIANT 33: note = Any amino acid
  VARIANT 34: note = Any amino acid
  VARIANT 35: note = Any amino acid
  VARIANT 36: note = Any amino acid
  VARIANT 37: note = Any amino acid
  VARIANT 38: note = Any amino acid
  VARIANT 39: note = Any amino acid
  VARIANT 42: note = Any amino acid
  VARIANT 43: note = Any amino acid
  VARIANT 44: note = Any amino acid
  VARIANT 45: note = Any amino acid
  VARIANT 46: note = Any amino acid
  VARIANT 47: note = Any amino acid
  VARIANT 48: note = Any amino acid
  VARIANT 49: note = Any amino acid
  VARIANT 50: note = Any amino acid
  VARIANT 51: note = Any amino acid
GXXXXXXXXXXXXXXXXXXXXXXXXXXXXXXGXXXXXXXSGXXXXXXXXXXC

SEQ ID NO: 797076 - protein, 52 aa, unidentified
  VARIANT 2: note = Any amino acid
  VARIANT 3: note = Any amino acid
  VARIANT 4: note = Any amino acid
  VARIANT 5: note = Any amino acid
  VARIANT 6: note = Any amino acid
  VARIANT 7: note = Any amino acid
  VARIANT 8: note = Any amino acid
  VARIANT 9: note = Any amino acid
  VARIANT 10: note = Any amino acid
  VARIANT 11: note = Any amino acid
  VARIANT 12: note = Any amino acid
  VARIANT 13: note = Any amino acid
  VARIANT 14: note = Any amino acid
  VARIANT 15: note = Any amino acid
  VARIANT 16: note = Any amino acid
  VARIANT 17: note = Any amino acid
  VARIANT 18: note = Any amino acid
  VARIANT 19: note = Any amino acid
  VARIANT 20: note = Any amino acid
  VARIANT 21: note = Any amino acid
  VARIANT 22: note = Any amino acid
  VARIANT 23: note = Any amino acid
  VARIANT 24: note = Any amino acid
  VARIANT 25: note = Any amino acid
  VARIANT 26: note = Any amino acid
  VARIANT 27: note = Any amino acid
  VARIANT 28: note = Any amino acid
  VARIANT 29: note = Any amino acid
  VARIANT 31: note = Any amino acid
  VARIANT 32: note = Any amino acid
  VARIANT 33: note = Any amino acid
  VARIANT 34: note = Any amino acid
  VARIANT 35: note = Any amino acid
  VARIANT 36: note = Any amino acid
  VARIANT 37: note = Any amino acid
  VARIANT 40: note = Any amino acid
  VARIANT 41: note = Any amino acid
  VARIANT 42: note = Any amino acid
  VARIANT 43: note = Any amino acid
  VARIANT 44: note = Any amino acid
  VARIANT 45: note = Any amino acid
  VARIANT 46: note = Any amino acid
  VARIANT 47: note = Any amino acid
  VARIANT 48: note = Any amino acid
  VARIANT 49: note = Any amino acid
  VARIANT 50: note = Any amino acid
  VARIANT 51: note = Any amino acid
GXXXXXXXXXXXXXXXXXXXXXXXXXXXXGXXXXXXXSGXXXXXXXXXXXXG

SEQ ID NO: 797077 - protein, 52 aa, unidentified
  VARIANT 2: note = Any amino acid
  VARIANT 3: note = Any amino acid
  VARIANT 4: note = Any amino acid
  VARIANT 5: note = Any amino acid
  VARIANT 6: note = Any amino acid
  VARIANT 7: note = Any amino acid
  VARIANT 8: note = Any amino acid
  VARIANT 9: note = Any amino acid
  VARIANT 10: note = Any amino acid
  VARIANT 11: note = Any amino acid
  VARIANT 12: note = Any amino acid
  VARIANT 13: note = Any amino acid
  VARIANT 14: note = Any amino acid
  VARIANT 15: note = Any amino acid
  VARIANT 16: note = Any amino acid
  VARIANT 17: note = Any amino acid
  VARIANT 18: note = Any amino acid
  VARIANT 19: note = Any amino acid
  VARIANT 20: note = Any amino acid
  VARIANT 21: note = Any amino acid
  VARIANT 22: note = Any amino acid
  VARIANT 23: note = Any amino acid
  VARIANT 24: note = Any amino acid
  VARIANT 25: note = Any amino acid
  VARIANT 26: note = Any amino acid
  VARIANT 27: note = Any amino acid
  VARIANT 28: note = Any amino acid
  VARIANT 29: note = Any amino acid
  VARIANT 30: note = Any amino acid
  VARIANT 31: note = Any amino acid
  VARIANT 33: note = Any amino acid
  VARIANT 34: note = Any amino acid
  VARIANT 35: note = Any amino acid
  VARIANT 36: note = Any amino acid
  VARIANT 37: note = Any amino acid
  VARIANT 38: note = Any amino acid
  VARIANT 39: note = Any amino acid
  VARIANT 42: note = Any amino acid
  VARIANT 43: note = Any amino acid
  VARIANT 44: note = Any amino acid
  VARIANT 45: note = Any amino acid
  VARIANT 46: note = Any amino acid
  VARIANT 47: note = Any amino acid
  VARIANT 48: note = Any amino acid
  VARIANT 49: note = Any amino acid
  VARIANT 50: note = Any amino acid
  VARIANT 51: note = Any amino acid
GXXXXXXXXXXXXXXXXXXXXXXXXXXXXXXGXXXXXXXSAXXXXXXXXXXA

SEQ ID NO: 797078 - protein, 52 aa, unidentified
  VARIANT 2: note = Any amino acid
  VARIANT 3: note = Any amino acid
  VARIANT 4: note = Any amino acid
  VARIANT 5: note = Any amino acid
  VARIANT 6: note = Any amino acid
  VARIANT 7: note = Any amino acid
  VARIANT 8: note = Any amino acid
  VARIANT 9: note = Any amino acid
  VARIANT 10: note = Any amino acid
  VARIANT 11: note = Any amino acid
  VARIANT 12: note = Any amino acid
  VARIANT 13: note = Any amino acid
  VARIANT 14: note = Any amino acid
  VARIANT 15: note = Any amino acid
  VARIANT 16: note = Any amino acid
  VARIANT 17: note = Any amino acid
  VARIANT 18: note = Any amino acid
  VARIANT 19: note = Any amino acid
  VARIANT 20: note = Any amino acid
  VARIANT 21: note = Any amino acid
  VARIANT 22: note = Any amino acid
  VARIANT 23: note = Any amino acid
  VARIANT 24: note = Any amino acid
  VARIANT 25: note = Any amino acid
  VARIANT 26: note = Any amino acid
  VARIANT 27: note = Any amino acid
  VARIANT 28: note = Any amino acid
  VARIANT 29: note = Any amino acid
  VARIANT 30: note = Any amino acid
  VARIANT 31: note = Any amino acid
  VARIANT 33: note = Any amino acid
  VARIANT 34: note = Any amino acid
  VARIANT 35: note = Any amino acid
  VARIANT 36: note = Any amino acid
  VARIANT 37: note = Any amino acid
  VARIANT 38: note = Any amino acid
  VARIANT 39: note = Any amino acid
  VARIANT 42: note = Any amino acid
  VARIANT 43: note = Any amino acid
  VARIANT 44: note = Any amino acid
  VARIANT 45: note = Any amino acid
  VARIANT 46: note = Any amino acid
  VARIANT 47: note = Any amino acid
  VARIANT 48: note = Any amino acid
  VARIANT 49: note = Any amino acid
  VARIANT 50: note = Any amino acid
  VARIANT 51: note = Any amino acid
GXXXXXXXXXXXXXXXXXXXXXXXXXXXXXXGXXXXXXXSGXXXXXXXXXXV

SEQ ID NO: 797079 - protein, 54 aa, unidentified
  VARIANT 2: note = Any amino acid
  VARIANT 3: note = Any amino acid
  VARIANT 4: note = Any amino acid
  VARIANT 5: note = Any amino acid
  VARIANT 6: note = Any amino acid
  VARIANT 7: note = Any amino acid
  VARIANT 8: note = Any amino acid
  VARIANT 9: note = Any amino acid
  VARIANT 10: note = Any amino acid
  VARIANT 11: note = Any amino acid
  VARIANT 12: note = Any amino acid
  VARIANT 13: note = Any amino acid
  VARIANT 14: note = Any amino acid
  VARIANT 15: note = Any amino acid
  VARIANT 16: note = Any amino acid
  VARIANT 17: note = Any amino acid
  VARIANT 18: note = Any amino acid
  VARIANT 19: note = Any amino acid
  VARIANT 20: note = Any amino acid
  VARIANT 21: note = Any amino acid
  VARIANT 22: note = Any amino acid
  VARIANT 23: note = Any amino acid
  VARIANT 24: note = Any amino acid
  VARIANT 25: note = Any amino acid
  VARIANT 26: note = Any amino acid
  VARIANT 27: note = Any amino acid
  VARIANT 28: note = Any amino acid
  VARIANT 29: note = Any amino acid
  VARIANT 30: note = Any amino acid
  VARIANT 32: note = Any amino acid
  VARIANT 33: note = Any amino acid
  VARIANT 34: note = Any amino acid
  VARIANT 35: note = Any amino acid
  VARIANT 36: note = Any amino acid
  VARIANT 37: note = Any amino acid
  VARIANT 38: note = Any amino acid
  VARIANT 41: note = Any amino acid
  VARIANT 42: note = Any amino acid
  VARIANT 43: note = Any amino acid
  VARIANT 44: note = Any amino acid
  VARIANT 45: note = Any amino acid
  VARIANT 46: note = Any amino acid
  VARIANT 47: note = Any amino acid
  VARIANT 48: note = Any amino acid
  VARIANT 49: note = Any amino acid
  VARIANT 50: note = Any amino acid
  VARIANT 51: note = Any amino acid
  VARIANT 52: note = Any amino acid
  VARIANT 53: note = Any amino acid
GXXXXXXXXXXXXXXXXXXXXXXXXXXXXXGXXXXXXXSGXXXXXXXXXXXXXG

SEQ ID NO: 797080 - protein, 53 aa, unidentified
  VARIANT 2: note = Any amino acid
  VARIANT 3: note = Any amino acid
  VARIANT 4: note = Any amino acid
  VARIANT 5: note = Any amino acid
  VARIANT 6: note = Any amino acid
  VARIANT 7: note = Any amino acid
  VARIANT 8: note = Any amino acid
  VARIANT 9: note = Any amino acid
  VARIANT 10: note = Any amino acid
  VARIANT 11: note = Any amino acid
  VARIANT 12: note = Any amino acid
  VARIANT 13: note = Any amino acid
  VARIANT 14: note = Any amino acid
  VARIANT 15: note = Any amino acid
  VARIANT 16: note = Any amino acid
  VARIANT 17: note = Any amino acid
  VARIANT 18: note = Any amino acid
  VARIANT 19: note = Any amino acid
  VARIANT 20: note = Any amino acid
  VARIANT 21: note = Any amino acid
  VARIANT 22: note = Any amino acid
  VARIANT 23: note = Any amino acid
  VARIANT 24: note = Any amino acid
  VARIANT 25: note = Any amino acid
  VARIANT 26: note = Any amino acid
  VARIANT 27: note = Any amino acid
  VARIANT 28: note = Any amino acid
  VARIANT 29: note = Any amino acid
  VARIANT 30: note = Any amino acid
  VARIANT 31: note = Any amino acid
  VARIANT 33: note = Any amino acid
  VARIANT 34: note = Any amino acid
  VARIANT 35: note = Any amino acid
  VARIANT 36: note = Any amino acid
  VARIANT 37: note = Any amino acid
  VARIANT 38: note = Any amino acid
  VARIANT 39: note = Any amino acid
  VARIANT 42: note = Any amino acid
  VARIANT 43: note = Any amino acid
  VARIANT 44: note = Any amino acid
  VARIANT 45: note = Any amino acid
  VARIANT 46: note = Any amino acid
  VARIANT 47: note = Any amino acid
  VARIANT 48: note = Any amino acid
  VARIANT 49: note = Any amino acid
  VARIANT 50: note = Any amino acid
  VARIANT 51: note = Any amino acid
  VARIANT 52: note = Any amino acid
GXXXXXXXXXXXXXXXXXXXXXXXXXXXXXXGXXXXXXXSGXXXXXXXXXXXG

SEQ ID NO: 797081 - protein, 52 aa, unidentified
  VARIANT 2: note = Any amino acid
  VARIANT 3: note = Any amino acid
  VARIANT 4: note = Any amino acid
  VARIANT 5: note = Any amino acid
  VARIANT 6: note = Any amino acid
  VARIANT 7: note = Any amino acid
  VARIANT 8: note = Any amino acid
  VARIANT 9: note = Any amino acid
  VARIANT 10: note = Any amino acid
  VARIANT 11: note = Any amino acid
  VARIANT 12: note = Any amino acid
  VARIANT 13: note = Any amino acid
  VARIANT 14: note = Any amino acid
  VARIANT 15: note = Any amino acid
  VARIANT 16: note = Any amino acid
  VARIANT 17: note = Any amino acid
  VARIANT 18: note = Any amino acid
  VARIANT 19: note = Any amino acid
  VARIANT 20: note = Any amino acid
  VARIANT 21: note = Any amino acid
  VARIANT 22: note = Any amino acid
  VARIANT 23: note = Any amino acid
  VARIANT 24: note = Any amino acid
  VARIANT 25: note = Any amino acid
  VARIANT 26: note = Any amino acid
  VARIANT 27: note = Any amino acid
  VARIANT 28: note = Any amino acid
  VARIANT 29: note = Any amino acid
  VARIANT 30: note = Any amino acid
  VARIANT 32: note = Any amino acid
  VARIANT 33: note = Any amino acid
  VARIANT 34: note = Any amino acid
  VARIANT 35: note = Any amino acid
  VARIANT 36: note = Any amino acid
  VARIANT 37: note = Any amino acid
  VARIANT 38: note = Any amino acid
  VARIANT 41: note = Any amino acid
  VARIANT 42: note = Any amino acid
  VARIANT 43: note = Any amino acid
  VARIANT 44: note = Any amino acid
  VARIANT 45: note = Any amino acid
  VARIANT 46: note = Any amino acid
  VARIANT 47: note = Any amino acid
  VARIANT 48: note = Any amino acid
  VARIANT 49: note = Any amino acid
  VARIANT 50: note = Any amino acid
  VARIANT 51: note = Any amino acid
GXXXXXXXXXXXXXXXXXXXXXXXXXXXXXGXXXXXXXSAXXXXXXXXXXXG

SEQ ID NO: 797082 - protein, 51 aa, unidentified
  VARIANT 2: note = Any amino acid
  VARIANT 3: note = Any amino acid
  VARIANT 4: note = Any amino acid
  VARIANT 5: note = Any amino acid
  VARIANT 6: note = Any amino acid
  VARIANT 7: note = Any amino acid
  VARIANT 8: note = Any amino acid
  VARIANT 9: note = Any amino acid
  VARIANT 10: note = Any amino acid
  VARIANT 11: note = Any amino acid
  VARIANT 12: note = Any amino acid
  VARIANT 13: note = Any amino acid
  VARIANT 14: note = Any amino acid
  VARIANT 15: note = Any amino acid
  VARIANT 16: note = Any amino acid
  VARIANT 17: note = Any amino acid
  VARIANT 18: note = Any amino acid
  VARIANT 19: note = Any amino acid
  VARIANT 20: note = Any amino acid
  VARIANT 21: note = Any amino acid
  VARIANT 22: note = Any amino acid
  VARIANT 23: note = Any amino acid
  VARIANT 24: note = Any amino acid
  VARIANT 25: note = Any amino acid
  VARIANT 26: note = Any amino acid
  VARIANT 27: note = Any amino acid
  VARIANT 28: note = Any amino acid
  VARIANT 29: note = Any amino acid
  VARIANT 30: note = Any amino acid
  VARIANT 32: note = Any amino acid
  VARIANT 33: note = Any amino acid
  VARIANT 34: note = Any amino acid
  VARIANT 35: note = Any amino acid
  VARIANT 36: note = Any amino acid
  VARIANT 37: note = Any amino acid
  VARIANT 38: note = Any amino acid
  VARIANT 41: note = Any amino acid
  VARIANT 42: note = Any amino acid
  VARIANT 43: note = Any amino acid
  VARIANT 44: note = Any amino acid
  VARIANT 45: note = Any amino acid
  VARIANT 46: note = Any amino acid
  VARIANT 47: note = Any amino acid
  VARIANT 48: note = Any amino acid
  VARIANT 49: note = Any amino acid
  VARIANT 50: note = Any amino acid
GXXXXXXXXXXXXXXXXXXXXXXXXXXXXXGXXXXXXXSAXXXXXXXXXXG

SEQ ID NO: 797083 - protein, 52 aa, unidentified
  VARIANT 2: note = Any amino acid
  VARIANT 3: note = Any amino acid
  VARIANT 4: note = Any amino acid
  VARIANT 5: note = Any amino acid
  VARIANT 6: note = Any amino acid
  VARIANT 7: note = Any amino acid
  VARIANT 8: note = Any amino acid
  VARIANT 9: note = Any amino acid
  VARIANT 10: note = Any amino acid
  VARIANT 11: note = Any amino acid
  VARIANT 12: note = Any amino acid
  VARIANT 13: note = Any amino acid
  VARIANT 14: note = Any amino acid
  VARIANT 15: note = Any amino acid
  VARIANT 16: note = Any amino acid
  VARIANT 17: note = Any amino acid
  VARIANT 18: note = Any amino acid
  VARIANT 19: note = Any amino acid
  VARIANT 20: note = Any amino acid
  VARIANT 21: note = Any amino acid
  VARIANT 22: note = Any amino acid
  VARIANT 23: note = Any amino acid
  VARIANT 24: note = Any amino acid
  VARIANT 25: note = Any amino acid
  VARIANT 26: note = Any amino acid
  VARIANT 27: note = Any amino acid
  VARIANT 28: note = Any amino acid
  VARIANT 29: note = Any amino acid
  VARIANT 30: note = Any amino acid
  VARIANT 32: note = Any amino acid
  VARIANT 33: note = Any amino acid
  VARIANT 34: note = Any amino acid
  VARIANT 35: note = Any amino acid
  VARIANT 36: note = Any amino acid
  VARIANT 37: note = Any amino acid
  VARIANT 38: note = Any amino acid
  VARIANT 41: note = Any amino acid
  VARIANT 42: note = Any amino acid
  VARIANT 43: note = Any amino acid
  VARIANT 44: note = Any amino acid
  VARIANT 45: note = Any amino acid
  VARIANT 46: note = Any amino acid
  VARIANT 47: note = Any amino acid
  VARIANT 48: note = Any amino acid
  VARIANT 49: note = Any amino acid
  VARIANT 50: note = Any amino acid
  VARIANT 51: note = Any amino acid
GXXXXXXXXXXXXXXXXXXXXXXXXXXXXXGXXXXXXXSGXXXXXXXXXXXA

SEQ ID NO: 797084 - protein, 51 aa, unidentified
  VARIANT 2: note = Any amino acid
  VARIANT 3: note = Any amino acid
  VARIANT 4: note = Any amino acid
  VARIANT 5: note = Any amino acid
  VARIANT 6: note = Any amino acid
  VARIANT 7: note = Any amino acid
  VARIANT 8: note = Any amino acid
  VARIANT 9: note = Any amino acid
  VARIANT 10: note = Any amino acid
  VARIANT 11: note = Any amino acid
  VARIANT 12: note = Any amino acid
  VARIANT 13: note = Any amino acid
  VARIANT 14: note = Any amino acid
  VARIANT 15: note = Any amino acid
  VARIANT 16: note = Any amino acid
  VARIANT 17: note = Any amino acid
  VARIANT 18: note = Any amino acid
  VARIANT 19: note = Any amino acid
  VARIANT 20: note = Any amino acid
  VARIANT 21: note = Any amino acid
  VARIANT 22: note = Any amino acid
  VARIANT 23: note = Any amino acid
  VARIANT 24: note = Any amino acid
  VARIANT 25: note = Any amino acid
  VARIANT 26: note = Any amino acid
  VARIANT 27: note = Any amino acid
  VARIANT 28: note = Any amino acid
  VARIANT 29: note = Any amino acid
  VARIANT 30: note = Any amino acid
  VARIANT 32: note = Any amino acid
  VARIANT 33: note = Any amino acid
  VARIANT 34: note = Any amino acid
  VARIANT 35: note = Any amino acid
  VARIANT 36: note = Any amino acid
  VARIANT 37: note = Any amino acid
  VARIANT 38: note = Any amino acid
  VARIANT 41: note = Any amino acid
  VARIANT 42: note = Any amino acid
  VARIANT 43: note = Any amino acid
  VARIANT 44: note = Any amino acid
  VARIANT 45: note = Any amino acid
  VARIANT 46: note = Any amino acid
  VARIANT 47: note = Any amino acid
  VARIANT 48: note = Any amino acid
  VARIANT 49: note = Any amino acid
  VARIANT 50: note = Any amino acid
GXXXXXXXXXXXXXXXXXXXXXXXXXXXXXGXXXXXXXSGXXXXXXXXXXV

SEQ ID NO: 797085 - protein, 52 aa, unidentified
  VARIANT 2: note = Any amino acid
  VARIANT 3: note = Any amino acid
  VARIANT 4: note = Any amino acid
  VARIANT 5: note = Any amino acid
  VARIANT 6: note = Any amino acid
  VARIANT 7: note = Any amino acid
  VARIANT 8: note = Any amino acid
  VARIANT 9: note = Any amino acid
  VARIANT 10: note = Any amino acid
  VARIANT 11: note = Any amino acid
  VARIANT 12: note = Any amino acid
  VARIANT 13: note = Any amino acid
  VARIANT 14: note = Any amino acid
  VARIANT 15: note = Any amino acid
  VARIANT 16: note = Any amino acid
  VARIANT 17: note = Any amino acid
  VARIANT 18: note = Any amino acid
  VARIANT 19: note = Any amino acid
  VARIANT 20: note = Any amino acid
  VARIANT 21: note = Any amino acid
  VARIANT 22: note = Any amino acid
  VARIANT 23: note = Any amino acid
  VARIANT 24: note = Any amino acid
  VARIANT 25: note = Any amino acid
  VARIANT 26: note = Any amino acid
  VARIANT 27: note = Any amino acid
  VARIANT 28: note = Any amino acid
  VARIANT 29: note = Any amino acid
  VARIANT 30: note = Any amino acid
  VARIANT 31: note = Any amino acid
  VARIANT 33: note = Any amino acid
  VARIANT 34: note = Any amino acid
  VARIANT 35: note = Any amino acid
  VARIANT 36: note = Any amino acid
  VARIANT 37: note = Any amino acid
  VARIANT 38: note = Any amino acid
  VARIANT 39: note = Any amino acid
  VARIANT 42: note = Any amino acid
  VARIANT 43: note = Any amino acid
  VARIANT 44: note = Any amino acid
  VARIANT 45: note = Any amino acid
  VARIANT 46: note = Any amino acid
  VARIANT 47: note = Any amino acid
  VARIANT 48: note = Any amino acid
  VARIANT 49: note = Any amino acid
  VARIANT 50: note = Any amino acid
  VARIANT 51: note = Any amino acid
GXXXXXXXXXXXXXXXXXXXXXXXXXXXXXXKXXXXXXXSGXXXXXXXXXXG

SEQ ID NO: 797086 - protein, 53 aa, unidentified
  VARIANT 2: note = Any amino acid
  VARIANT 3: note = Any amino acid
  VARIANT 4: note = Any amino acid
  VARIANT 5: note = Any amino acid
  VARIANT 6: note = Any amino acid
  VARIANT 7: note = Any amino acid
  VARIANT 8: note = Any amino acid
  VARIANT 9: note = Any amino acid
  VARIANT 10: note = Any amino acid
  VARIANT 11: note = Any amino acid
  VARIANT 12: note = Any amino acid
  VARIANT 13: note = Any amino acid
  VARIANT 14: note = Any amino acid
  VARIANT 15: note = Any amino acid
  VARIANT 16: note = Any amino acid
  VARIANT 17: note = Any amino acid
  VARIANT 18: note = Any amino acid
  VARIANT 19: note = Any amino acid
  VARIANT 20: note = Any amino acid
  VARIANT 21: note = Any amino acid
  VARIANT 22: note = Any amino acid
  VARIANT 23: note = Any amino acid
  VARIANT 24: note = Any amino acid
  VARIANT 25: note = Any amino acid
  VARIANT 26: note = Any amino acid
  VARIANT 27: note = Any amino acid
  VARIANT 28: note = Any amino acid
  VARIANT 29: note = Any amino acid
  VARIANT 30: note = Any amino acid
  VARIANT 31: note = Any amino acid
  VARIANT 33: note = Any amino acid
  VARIANT 34: note = Any amino acid
  VARIANT 35: note = Any amino acid
  VARIANT 36: note = Any amino acid
  VARIANT 37: note = Any amino acid
  VARIANT 38: note = Any amino acid
  VARIANT 39: note = Any amino acid
  VARIANT 42: note = Any amino acid
  VARIANT 43: note = Any amino acid
  VARIANT 44: note = Any amino acid
  VARIANT 45: note = Any amino acid
  VARIANT 46: note = Any amino acid
  VARIANT 47: note = Any amino acid
  VARIANT 48: note = Any amino acid
  VARIANT 49: note = Any amino acid
  VARIANT 50: note = Any amino acid
  VARIANT 51: note = Any amino acid
  VARIANT 52: note = Any amino acid
GXXXXXXXXXXXXXXXXXXXXXXXXXXXXXXGXXXXXXXSGXXXXXXXXXXXY

SEQ ID NO: 797087 - protein, 53 aa, unidentified
  VARIANT 2: note = Any amino acid
  VARIANT 3: note = Any amino acid
  VARIANT 4: note = Any amino acid
  VARIANT 5: note = Any amino acid
  VARIANT 6: note = Any amino acid
  VARIANT 7: note = Any amino acid
  VARIANT 8: note = Any amino acid
  VARIANT 9: note = Any amino acid
  VARIANT 10: note = Any amino acid
  VARIANT 11: note = Any amino acid
  VARIANT 12: note = Any amino acid
  VARIANT 13: note = Any amino acid
  VARIANT 14: note = Any amino acid
  VARIANT 15: note = Any amino acid
  VARIANT 16: note = Any amino acid
  VARIANT 17: note = Any amino acid
  VARIANT 18: note = Any amino acid
  VARIANT 19: note = Any amino acid
  VARIANT 20: note = Any amino acid
  VARIANT 21: note = Any amino acid
  VARIANT 22: note = Any amino acid
  VARIANT 23: note = Any amino acid
  VARIANT 24: note = Any amino acid
  VARIANT 25: note = Any amino acid
  VARIANT 26: note = Any amino acid
  VARIANT 27: note = Any amino acid
  VARIANT 28: note = Any amino acid
  VARIANT 29: note = Any amino acid
  VARIANT 30: note = Any amino acid
  VARIANT 32: note = Any amino acid
  VARIANT 33: note = Any amino acid
  VARIANT 34: note = Any amino acid
  VARIANT 35: note = Any amino acid
  VARIANT 36: note = Any amino acid
  VARIANT 37: note = Any amino acid
  VARIANT 38: note = Any amino acid
  VARIANT 41: note = Any amino acid
  VARIANT 42: note = Any amino acid
  VARIANT 43: note = Any amino acid
  VARIANT 44: note = Any amino acid
  VARIANT 45: note = Any amino acid
  VARIANT 46: note = Any amino acid
  VARIANT 47: note = Any amino acid
  VARIANT 48: note = Any amino acid
  VARIANT 49: note = Any amino acid
  VARIANT 50: note = Any amino acid
  VARIANT 51: note = Any amino acid
  VARIANT 52: note = Any amino acid
GXXXXXXXXXXXXXXXXXXXXXXXXXXXXXGXXXXXXXTGXXXXXXXXXXXXG

SEQ ID NO: 797088 - protein, 52 aa, unidentified
  VARIANT 2: note = Any amino acid
  VARIANT 3: note = Any amino acid
  VARIANT 4: note = Any amino acid
  VARIANT 5: note = Any amino acid
  VARIANT 6: note = Any amino acid
  VARIANT 7: note = Any amino acid
  VARIANT 8: note = Any amino acid
  VARIANT 9: note = Any amino acid
  VARIANT 10: note = Any amino acid
  VARIANT 11: note = Any amino acid
  VARIANT 12: note = Any amino acid
  VARIANT 13: note = Any amino acid
  VARIANT 14: note = Any amino acid
  VARIANT 15: note = Any amino acid
  VARIANT 16: note = Any amino acid
  VARIANT 17: note = Any amino acid
  VARIANT 18: note = Any amino acid
  VARIANT 19: note = Any amino acid
  VARIANT 20: note = Any amino acid
  VARIANT 21: note = Any amino acid
  VARIANT 22: note = Any amino acid
  VARIANT 23: note = Any amino acid
  VARIANT 24: note = Any amino acid
  VARIANT 25: note = Any amino acid
  VARIANT 26: note = Any amino acid
  VARIANT 27: note = Any amino acid
  VARIANT 28: note = Any amino acid
  VARIANT 29: note = Any amino acid
  VARIANT 30: note = Any amino acid
  VARIANT 31: note = Any amino acid
  VARIANT 33: note = Any amino acid
  VARIANT 34: note = Any amino acid
  VARIANT 35: note = Any amino acid
  VARIANT 36: note = Any amino acid
  VARIANT 37: note = Any amino acid
  VARIANT 38: note = Any amino acid
  VARIANT 39: note = Any amino acid
  VARIANT 42: note = Any amino acid
  VARIANT 43: note = Any amino acid
  VARIANT 44: note = Any amino acid
  VARIANT 45: note = Any amino acid
  VARIANT 46: note = Any amino acid
  VARIANT 47: note = Any amino acid
  VARIANT 48: note = Any amino acid
  VARIANT 49: note = Any amino acid
  VARIANT 50: note = Any amino acid
  VARIANT 51: note = Any amino acid
GXXXXXXXXXXXXXXXXXXXXXXXXXXXXXXAXXXXXXXSAXXXXXXXXXXG

SEQ ID NO: 797089 - protein, 52 aa, unidentified
  VARIANT 2: note = Any amino acid
  VARIANT 3: note = Any amino acid
  VARIANT 4: note = Any amino acid
  VARIANT 5: note = Any amino acid
  VARIANT 6: note = Any amino acid
  VARIANT 7: note = Any amino acid
  VARIANT 8: note = Any amino acid
  VARIANT 9: note = Any amino acid
  VARIANT 10: note = Any amino acid
  VARIANT 11: note = Any amino acid
  VARIANT 12: note = Any amino acid
  VARIANT 13: note = Any amino acid
  VARIANT 14: note = Any amino acid
  VARIANT 15: note = Any amino acid
  VARIANT 16: note = Any amino acid
  VARIANT 17: note = Any amino acid
  VARIANT 18: note = Any amino acid
  VARIANT 19: note = Any amino acid
  VARIANT 20: note = Any amino acid
  VARIANT 21: note = Any amino acid
  VARIANT 22: note = Any amino acid
  VARIANT 23: note = Any amino acid
  VARIANT 24: note = Any amino acid
  VARIANT 25: note = Any amino acid
  VARIANT 26: note = Any amino acid
  VARIANT 27: note = Any amino acid
  VARIANT 28: note = Any amino acid
  VARIANT 29: note = Any amino acid
  VARIANT 30: note = Any amino acid
  VARIANT 31: note = Any amino acid
  VARIANT 33: note = Any amino acid
  VARIANT 34: note = Any amino acid
  VARIANT 35: note = Any amino acid
  VARIANT 36: note = Any amino acid
  VARIANT 37: note = Any amino acid
  VARIANT 38: note = Any amino acid
  VARIANT 39: note = Any amino acid
  VARIANT 42: note = Any amino acid
  VARIANT 43: note = Any amino acid
  VARIANT 44: note = Any amino acid
  VARIANT 45: note = Any amino acid
  VARIANT 46: note = Any amino acid
  VARIANT 47: note = Any amino acid
  VARIANT 48: note = Any amino acid
  VARIANT 49: note = Any amino acid
  VARIANT 50: note = Any amino acid
  VARIANT 51: note = Any amino acid
GXXXXXXXXXXXXXXXXXXXXXXXXXXXXXXGXXXXXXXSGXXXXXXXXXXA

SEQ ID NO: 797090 - protein, 51 aa, unidentified
  VARIANT 2: note = Any amino acid
  VARIANT 3: note = Any amino acid
  VARIANT 4: note = Any amino acid
  VARIANT 5: note = Any amino acid
  VARIANT 6: note = Any amino acid
  VARIANT 7: note = Any amino acid
  VARIANT 8: note = Any amino acid
  VARIANT 9: note = Any amino acid
  VARIANT 10: note = Any amino acid
  VARIANT 11: note = Any amino acid
  VARIANT 12: note = Any amino acid
  VARIANT 13: note = Any amino acid
  VARIANT 14: note = Any amino acid
  VARIANT 15: note = Any amino acid
  VARIANT 16: note = Any amino acid
  VARIANT 17: note = Any amino acid
  VARIANT 18: note = Any amino acid
  VARIANT 19: note = Any amino acid
  VARIANT 20: note = Any amino acid
  VARIANT 21: note = Any amino acid
  VARIANT 22: note = Any amino acid
  VARIANT 23: note = Any amino acid
  VARIANT 24: note = Any amino acid
  VARIANT 25: note = Any amino acid
  VARIANT 26: note = Any amino acid
  VARIANT 27: note = Any amino acid
  VARIANT 28: note = Any amino acid
  VARIANT 29: note = Any amino acid
  VARIANT 30: note = Any amino acid
  VARIANT 32: note = Any amino acid
  VARIANT 33: note = Any amino acid
  VARIANT 34: note = Any amino acid
  VARIANT 35: note = Any amino acid
  VARIANT 36: note = Any amino acid
  VARIANT 37: note = Any amino acid
  VARIANT 38: note = Any amino acid
  VARIANT 41: note = Any amino acid
  VARIANT 42: note = Any amino acid
  VARIANT 43: note = Any amino acid
  VARIANT 44: note = Any amino acid
  VARIANT 45: note = Any amino acid
  VARIANT 46: note = Any amino acid
  VARIANT 47: note = Any amino acid
  VARIANT 48: note = Any amino acid
  VARIANT 49: note = Any amino acid
  VARIANT 50: note = Any amino acid
GXXXXXXXXXXXXXXXXXXXXXXXXXXXXXGXXXXXXXSGXXXXXXXXXXC

SEQ ID NO: 797091 - protein, 52 aa, unidentified
  VARIANT 2: note = Any amino acid
  VARIANT 3: note = Any amino acid
  VARIANT 4: note = Any amino acid
  VARIANT 5: note = Any amino acid
  VARIANT 6: note = Any amino acid
  VARIANT 7: note = Any amino acid
  VARIANT 8: note = Any amino acid
  VARIANT 9: note = Any amino acid
  VARIANT 10: note = Any amino acid
  VARIANT 11: note = Any amino acid
  VARIANT 12: note = Any amino acid
  VARIANT 13: note = Any amino acid
  VARIANT 14: note = Any amino acid
  VARIANT 15: note = Any amino acid
  VARIANT 16: note = Any amino acid
  VARIANT 17: note = Any amino acid
  VARIANT 18: note = Any amino acid
  VARIANT 19: note = Any amino acid
  VARIANT 20: note = Any amino acid
  VARIANT 21: note = Any amino acid
  VARIANT 22: note = Any amino acid
  VARIANT 23: note = Any amino acid
  VARIANT 24: note = Any amino acid
  VARIANT 25: note = Any amino acid
  VARIANT 26: note = Any amino acid
  VARIANT 27: note = Any amino acid
  VARIANT 28: note = Any amino acid
  VARIANT 29: note = Any amino acid
  VARIANT 30: note = Any amino acid
  VARIANT 31: note = Any amino acid
  VARIANT 33: note = Any amino acid
  VARIANT 34: note = Any amino acid
  VARIANT 35: note = Any amino acid
  VARIANT 36: note = Any amino acid
  VARIANT 37: note = Any amino acid
  VARIANT 38: note = Any amino acid
  VARIANT 39: note = Any amino acid
  VARIANT 42: note = Any amino acid
  VARIANT 43: note = Any amino acid
  VARIANT 44: note = Any amino acid
  VARIANT 45: note = Any amino acid
  VARIANT 46: note = Any amino acid
  VARIANT 47: note = Any amino acid
  VARIANT 48: note = Any amino acid
  VARIANT 49: note = Any amino acid
  VARIANT 50: note = Any amino acid
  VARIANT 51: note = Any amino acid
GXXXXXXXXXXXXXXXXXXXXXXXXXXXXXXKXXXXXXXSAXXXXXXXXXXG

SEQ ID NO: 797092 - protein, 52 aa, unidentified
  VARIANT 2: note = Any amino acid
  VARIANT 3: note = Any amino acid
  VARIANT 4: note = Any amino acid
  VARIANT 5: note = Any amino acid
  VARIANT 6: note = Any amino acid
  VARIANT 7: note = Any amino acid
  VARIANT 8: note = Any amino acid
  VARIANT 9: note = Any amino acid
  VARIANT 10: note = Any amino acid
  VARIANT 11: note = Any amino acid
  VARIANT 12: note = Any amino acid
  VARIANT 13: note = Any amino acid
  VARIANT 14: note = Any amino acid
  VARIANT 15: note = Any amino acid
  VARIANT 16: note = Any amino acid
  VARIANT 17: note = Any amino acid
  VARIANT 18: note = Any amino acid
  VARIANT 19: note = Any amino acid
  VARIANT 20: note = Any amino acid
  VARIANT 21: note = Any amino acid
  VARIANT 22: note = Any amino acid
  VARIANT 23: note = Any amino acid
  VARIANT 24: note = Any amino acid
  VARIANT 25: note = Any amino acid
  VARIANT 26: note = Any amino acid
  VARIANT 27: note = Any amino acid
  VARIANT 28: note = Any amino acid
  VARIANT 29: note = Any amino acid
  VARIANT 30: note = Any amino acid
  VARIANT 31: note = Any amino acid
  VARIANT 33: note = Any amino acid
  VARIANT 34: note = Any amino acid
  VARIANT 35: note = Any amino acid
  VARIANT 36: note = Any amino acid
  VARIANT 37: note = Any amino acid
  VARIANT 38: note = Any amino acid
  VARIANT 39: note = Any amino acid
  VARIANT 42: note = Any amino acid
  VARIANT 43: note = Any amino acid
  VARIANT 44: note = Any amino acid
  VARIANT 45: note = Any amino acid
  VARIANT 46: note = Any amino acid
  VARIANT 47: note = Any amino acid
  VARIANT 48: note = Any amino acid
  VARIANT 49: note = Any amino acid
  VARIANT 50: note = Any amino acid
  VARIANT 51: note = Any amino acid
GXXXXXXXXXXXXXXXXXXXXXXXXXXXXXXGXXXXXXXTGXXXXXXXXXXG

SEQ ID NO: 797093 - protein, 50 aa, unidentified
  VARIANT 2: note = Any amino acid
  VARIANT 3: note = Any amino acid
  VARIANT 4: note = Any amino acid
  VARIANT 5: note = Any amino acid
  VARIANT 6: note = Any amino acid
  VARIANT 7: note = Any amino acid
  VARIANT 8: note = Any amino acid
  VARIANT 9: note = Any amino acid
  VARIANT 10: note = Any amino acid
  VARIANT 11: note = Any amino acid
  VARIANT 12: note = Any amino acid
  VARIANT 13: note = Any amino acid
  VARIANT 14: note = Any amino acid
  VARIANT 15: note = Any amino acid
  VARIANT 16: note = Any amino acid
  VARIANT 17: note = Any amino acid
  VARIANT 18: note = Any amino acid
  VARIANT 19: note = Any amino acid
  VARIANT 20: note = Any amino acid
  VARIANT 21: note = Any amino acid
  VARIANT 22: note = Any amino acid
  VARIANT 23: note = Any amino acid
  VARIANT 24: note = Any amino acid
  VARIANT 25: note = Any amino acid
  VARIANT 26: note = Any amino acid
  VARIANT 27: note = Any amino acid
  VARIANT 28: note = Any amino acid
  VARIANT 29: note = Any amino acid
  VARIANT 31: note = Any amino acid
  VARIANT 32: note = Any amino acid
  VARIANT 33: note = Any amino acid
  VARIANT 34: note = Any amino acid
  VARIANT 35: note = Any amino acid
  VARIANT 36: note = Any amino acid
  VARIANT 37: note = Any amino acid
  VARIANT 40: note = Any amino acid
  VARIANT 41: note = Any amino acid
  VARIANT 42: note = Any amino acid
  VARIANT 43: note = Any amino acid
  VARIANT 44: note = Any amino acid
  VARIANT 45: note = Any amino acid
  VARIANT 46: note = Any amino acid
  VARIANT 47: note = Any amino acid
  VARIANT 48: note = Any amino acid
  VARIANT 49: note = Any amino acid
SXXXXXXXXXXXXXXXXXXXXXXXXXXXXGXXXXXXXSGXXXXXXXXXXG

SEQ ID NO: 797094 - protein, 53 aa, unidentified
  VARIANT 2: note = Any amino acid
  VARIANT 3: note = Any amino acid
  VARIANT 4: note = Any amino acid
  VARIANT 5: note = Any amino acid
  VARIANT 6: note = Any amino acid
  VARIANT 7: note = Any amino acid
  VARIANT 8: note = Any amino acid
  VARIANT 9: note = Any amino acid
  VARIANT 10: note = Any amino acid
  VARIANT 11: note = Any amino acid
  VARIANT 12: note = Any amino acid
  VARIANT 13: note = Any amino acid
  VARIANT 14: note = Any amino acid
  VARIANT 15: note = Any amino acid
  VARIANT 16: note = Any amino acid
  VARIANT 17: note = Any amino acid
  VARIANT 18: note = Any amino acid
  VARIANT 19: note = Any amino acid
  VARIANT 20: note = Any amino acid
  VARIANT 21: note = Any amino acid
  VARIANT 22: note = Any amino acid
  VARIANT 23: note = Any amino acid
  VARIANT 24: note = Any amino acid
  VARIANT 25: note = Any amino acid
  VARIANT 26: note = Any amino acid
  VARIANT 27: note = Any amino acid
  VARIANT 28: note = Any amino acid
  VARIANT 29: note = Any amino acid
  VARIANT 30: note = Any amino acid
  VARIANT 31: note = Any amino acid
  VARIANT 32: note = Any amino acid
  VARIANT 34: note = Any amino acid
  VARIANT 35: note = Any amino acid
  VARIANT 36: note = Any amino acid
  VARIANT 37: note = Any amino acid
  VARIANT 38: note = Any amino acid
  VARIANT 39: note = Any amino acid
  VARIANT 40: note = Any amino acid
  VARIANT 43: note = Any amino acid
  VARIANT 44: note = Any amino acid
  VARIANT 45: note = Any amino acid
  VARIANT 46: note = Any amino acid
  VARIANT 47: note = Any amino acid
  VARIANT 48: note = Any amino acid
  VARIANT 49: note = Any amino acid
  VARIANT 50: note = Any amino acid
  VARIANT 51: note = Any amino acid
  VARIANT 52: note = Any amino acid
GXXXXXXXXXXXXXXXXXXXXXXXXXXXXXXXGXXXXXXXSAXXXXXXXXXXG

SEQ ID NO: 797095 - protein, 52 aa, unidentified
  VARIANT 2: note = Any amino acid
  VARIANT 3: note = Any amino acid
  VARIANT 4: note = Any amino acid
  VARIANT 5: note = Any amino acid
  VARIANT 6: note = Any amino acid
  VARIANT 7: note = Any amino acid
  VARIANT 8: note = Any amino acid
  VARIANT 9: note = Any amino acid
  VARIANT 10: note = Any amino acid
  VARIANT 11: note = Any amino acid
  VARIANT 12: note = Any amino acid
  VARIANT 13: note = Any amino acid
  VARIANT 14: note = Any amino acid
  VARIANT 15: note = Any amino acid
  VARIANT 16: note = Any amino acid
  VARIANT 17: note = Any amino acid
  VARIANT 18: note = Any amino acid
  VARIANT 19: note = Any amino acid
  VARIANT 20: note = Any amino acid
  VARIANT 21: note = Any amino acid
  VARIANT 22: note = Any amino acid
  VARIANT 23: note = Any amino acid
  VARIANT 24: note = Any amino acid
  VARIANT 25: note = Any amino acid
  VARIANT 26: note = Any amino acid
  VARIANT 27: note = Any amino acid
  VARIANT 28: note = Any amino acid
  VARIANT 29: note = Any amino acid
  VARIANT 30: note = Any amino acid
  VARIANT 31: note = Any amino acid
  VARIANT 33: note = Any amino acid
  VARIANT 34: note = Any amino acid
  VARIANT 35: note = Any amino acid
  VARIANT 36: note = Any amino acid
  VARIANT 37: note = Any amino acid
  VARIANT 38: note = Any amino acid
  VARIANT 39: note = Any amino acid
  VARIANT 42: note = Any amino acid
  VARIANT 43: note = Any amino acid
  VARIANT 44: note = Any amino acid
  VARIANT 45: note = Any amino acid
  VARIANT 46: note = Any amino acid
  VARIANT 47: note = Any amino acid
  VARIANT 48: note = Any amino acid
  VARIANT 49: note = Any amino acid
  VARIANT 50: note = Any amino acid
  VARIANT 51: note = Any amino acid
GXXXXXXXXXXXXXXXXXXXXXXXXXXXXXXGXXXXXXXTGXXXXXXXXXXV

SEQ ID NO: 797096 - protein, 53 aa, unidentified
  VARIANT 2: note = Any amino acid
  VARIANT 3: note = Any amino acid
  VARIANT 4: note = Any amino acid
  VARIANT 5: note = Any amino acid
  VARIANT 6: note = Any amino acid
  VARIANT 7: note = Any amino acid
  VARIANT 8: note = Any amino acid
  VARIANT 9: note = Any amino acid
  VARIANT 10: note = Any amino acid
  VARIANT 11: note = Any amino acid
  VARIANT 12: note = Any amino acid
  VARIANT 13: note = Any amino acid
  VARIANT 14: note = Any amino acid
  VARIANT 15: note = Any amino acid
  VARIANT 16: note = Any amino acid
  VARIANT 17: note = Any amino acid
  VARIANT 18: note = Any amino acid
  VARIANT 19: note = Any amino acid
  VARIANT 20: note = Any amino acid
  VARIANT 21: note = Any amino acid
  VARIANT 22: note = Any amino acid
  VARIANT 23: note = Any amino acid
  VARIANT 24: note = Any amino acid
  VARIANT 25: note = Any amino acid
  VARIANT 26: note = Any amino acid
  VARIANT 27: note = Any amino acid
  VARIANT 28: note = Any amino acid
  VARIANT 29: note = Any amino acid
  VARIANT 30: note = Any amino acid
  VARIANT 31: note = Any amino acid
  VARIANT 33: note = Any amino acid
  VARIANT 34: note = Any amino acid
  VARIANT 35: note = Any amino acid
  VARIANT 36: note = Any amino acid
  VARIANT 37: note = Any amino acid
  VARIANT 38: note = Any amino acid
  VARIANT 39: note = Any amino acid
  VARIANT 42: note = Any amino acid
  VARIANT 43: note = Any amino acid
  VARIANT 44: note = Any amino acid
  VARIANT 45: note = Any amino acid
  VARIANT 46: note = Any amino acid
  VARIANT 47: note = Any amino acid
  VARIANT 48: note = Any amino acid
  VARIANT 49: note = Any amino acid
  VARIANT 50: note = Any amino acid
  VARIANT 51: note = Any amino acid
  VARIANT 52: note = Any amino acid
GXXXXXXXXXXXXXXXXXXXXXXXXXXXXXXRXXXXXXXSAXXXXXXXXXXXG

SEQ ID NO: 797097 - protein, 52 aa, unidentified
  VARIANT 2: note = Any amino acid
  VARIANT 3: note = Any amino acid
  VARIANT 4: note = Any amino acid
  VARIANT 5: note = Any amino acid
  VARIANT 6: note = Any amino acid
  VARIANT 7: note = Any amino acid
  VARIANT 8: note = Any amino acid
  VARIANT 9: note = Any amino acid
  VARIANT 10: note = Any amino acid
  VARIANT 11: note = Any amino acid
  VARIANT 12: note = Any amino acid
  VARIANT 13: note = Any amino acid
  VARIANT 14: note = Any amino acid
  VARIANT 15: note = Any amino acid
  VARIANT 16: note = Any amino acid
  VARIANT 17: note = Any amino acid
  VARIANT 18: note = Any amino acid
  VARIANT 19: note = Any amino acid
  VARIANT 20: note = Any amino acid
  VARIANT 21: note = Any amino acid
  VARIANT 22: note = Any amino acid
  VARIANT 23: note = Any amino acid
  VARIANT 24: note = Any amino acid
  VARIANT 25: note = Any amino acid
  VARIANT 26: note = Any amino acid
  VARIANT 27: note = Any amino acid
  VARIANT 28: note = Any amino acid
  VARIANT 29: note = Any amino acid
  VARIANT 30: note = Any amino acid
  VARIANT 31: note = Any amino acid
  VARIANT 33: note = Any amino acid
  VARIANT 34: note = Any amino acid
  VARIANT 35: note = Any amino acid
  VARIANT 36: note = Any amino acid
  VARIANT 37: note = Any amino acid
  VARIANT 38: note = Any amino acid
  VARIANT 39: note = Any amino acid
  VARIANT 42: note = Any amino acid
  VARIANT 43: note = Any amino acid
  VARIANT 44: note = Any amino acid
  VARIANT 45: note = Any amino acid
  VARIANT 46: note = Any amino acid
  VARIANT 47: note = Any amino acid
  VARIANT 48: note = Any amino acid
  VARIANT 49: note = Any amino acid
  VARIANT 50: note = Any amino acid
  VARIANT 51: note = Any amino acid
RXXXXXXXXXXXXXXXXXXXXXXXXXXXXXXGXXXXXXXSGXXXXXXXXXXC

SEQ ID NO: 797098 - protein, 52 aa, unidentified
  VARIANT 2: note = Any amino acid
  VARIANT 3: note = Any amino acid
  VARIANT 4: note = Any amino acid
  VARIANT 5: note = Any amino acid
  VARIANT 6: note = Any amino acid
  VARIANT 7: note = Any amino acid
  VARIANT 8: note = Any amino acid
  VARIANT 9: note = Any amino acid
  VARIANT 10: note = Any amino acid
  VARIANT 11: note = Any amino acid
  VARIANT 12: note = Any amino acid
  VARIANT 13: note = Any amino acid
  VARIANT 14: note = Any amino acid
  VARIANT 15: note = Any amino acid
  VARIANT 16: note = Any amino acid
  VARIANT 17: note = Any amino acid
  VARIANT 18: note = Any amino acid
  VARIANT 19: note = Any amino acid
  VARIANT 20: note = Any amino acid
  VARIANT 21: note = Any amino acid
  VARIANT 22: note = Any amino acid
  VARIANT 23: note = Any amino acid
  VARIANT 24: note = Any amino acid
  VARIANT 25: note = Any amino acid
  VARIANT 26: note = Any amino acid
  VARIANT 27: note = Any amino acid
  VARIANT 28: note = Any amino acid
  VARIANT 29: note = Any amino acid
  VARIANT 30: note = Any amino acid
  VARIANT 31: note = Any amino acid
  VARIANT 33: note = Any amino acid
  VARIANT 34: note = Any amino acid
  VARIANT 35: note = Any amino acid
  VARIANT 36: note = Any amino acid
  VARIANT 37: note = Any amino acid
  VARIANT 38: note = Any amino acid
  VARIANT 39: note = Any amino acid
  VARIANT 42: note = Any amino acid
  VARIANT 43: note = Any amino acid
  VARIANT 44: note = Any amino acid
  VARIANT 45: note = Any amino acid
  VARIANT 46: note = Any amino acid
  VARIANT 47: note = Any amino acid
  VARIANT 48: note = Any amino acid
  VARIANT 49: note = Any amino acid
  VARIANT 50: note = Any amino acid
  VARIANT 51: note = Any amino acid
GXXXXXXXXXXXXXXXXXXXXXXXXXXXXXXGXXXXXXXSGXXXXXXXXXXT

SEQ ID NO: 797099 - protein, 59 aa, unidentified
  VARIANT 2: note = Any amino acid
  VARIANT 3: note = Any amino acid
  VARIANT 4: note = Any amino acid
  VARIANT 5: note = Any amino acid
  VARIANT 6: note = Any amino acid
  VARIANT 7: note = Any amino acid
  VARIANT 8: note = Any amino acid
  VARIANT 9: note = Any amino acid
  VARIANT 10: note = Any amino acid
  VARIANT 11: note = Any amino acid
  VARIANT 12: note = Any amino acid
  VARIANT 13: note = Any amino acid
  VARIANT 14: note = Any amino acid
  VARIANT 15: note = Any amino acid
  VARIANT 16: note = Any amino acid
  VARIANT 17: note = Any amino acid
  VARIANT 18: note = Any amino acid
  VARIANT 19: note = Any amino acid
  VARIANT 20: note = Any amino acid
  VARIANT 21: note = Any amino acid
  VARIANT 22: note = Any amino acid
  VARIANT 23: note = Any amino acid
  VARIANT 24: note = Any amino acid
  VARIANT 25: note = Any amino acid
  VARIANT 26: note = Any amino acid
  VARIANT 27: note = Any amino acid
  VARIANT 28: note = Any amino acid
  VARIANT 29: note = Any amino acid
  VARIANT 30: note = Any amino acid
  VARIANT 32: note = Any amino acid
  VARIANT 33: note = Any amino acid
  VARIANT 34: note = Any amino acid
  VARIANT 35: note = Any amino acid
  VARIANT 36: note = Any amino acid
  VARIANT 37: note = Any amino acid
  VARIANT 38: note = Any amino acid
  VARIANT 41: note = Any amino acid
  VARIANT 42: note = Any amino acid
  VARIANT 43: note = Any amino acid
  VARIANT 44: note = Any amino acid
  VARIANT 45: note = Any amino acid
  VARIANT 46: note = Any amino acid
  VARIANT 47: note = Any amino acid
  VARIANT 48: note = Any amino acid
  VARIANT 49: note = Any amino acid
  VARIANT 50: note = Any amino acid
  VARIANT 51: note = Any amino acid
  VARIANT 52: note = Any amino acid
  VARIANT 53: note = Any amino acid
  VARIANT 54: note = Any amino acid
  VARIANT 55: note = Any amino acid
  VARIANT 56: note = Any amino acid
  VARIANT 57: note = Any amino acid
  VARIANT 58: note = Any amino acid
GXXXXXXXXXXXXXXXXXXXXXXXXXXXXXGXXXXXXXSGXXXXXXXXXXXXXXXXXXG

SEQ ID NO: 797100 - protein, 53 aa, unidentified
  VARIANT 2: note = Any amino acid
  VARIANT 3: note = Any amino acid
  VARIANT 4: note = Any amino acid
  VARIANT 5: note = Any amino acid
  VARIANT 6: note = Any amino acid
  VARIANT 7: note = Any amino acid
  VARIANT 8: note = Any amino acid
  VARIANT 9: note = Any amino acid
  VARIANT 10: note = Any amino acid
  VARIANT 11: note = Any amino acid
  VARIANT 12: note = Any amino acid
  VARIANT 13: note = Any amino acid
  VARIANT 14: note = Any amino acid
  VARIANT 15: note = Any amino acid
  VARIANT 16: note = Any amino acid
  VARIANT 17: note = Any amino acid
  VARIANT 18: note = Any amino acid
  VARIANT 19: note = Any amino acid
  VARIANT 20: note = Any amino acid
  VARIANT 21: note = Any amino acid
  VARIANT 22: note = Any amino acid
  VARIANT 23: note = Any amino acid
  VARIANT 24: note = Any amino acid
  VARIANT 25: note = Any amino acid
  VARIANT 26: note = Any amino acid
  VARIANT 27: note = Any amino acid
  VARIANT 28: note = Any amino acid
  VARIANT 29: note = Any amino acid
  VARIANT 30: note = Any amino acid
  VARIANT 32: note = Any amino acid
  VARIANT 33: note = Any amino acid
  VARIANT 34: note = Any amino acid
  VARIANT 35: note = Any amino acid
  VARIANT 36: note = Any amino acid
  VARIANT 37: note = Any amino acid
  VARIANT 38: note = Any amino acid
  VARIANT 41: note = Any amino acid
  VARIANT 42: note = Any amino acid
  VARIANT 43: note = Any amino acid
  VARIANT 44: note = Any amino acid
  VARIANT 45: note = Any amino acid
  VARIANT 46: note = Any amino acid
  VARIANT 47: note = Any amino acid
  VARIANT 48: note = Any amino acid
  VARIANT 49: note = Any amino acid
  VARIANT 50: note = Any amino acid
  VARIANT 51: note = Any amino acid
  VARIANT 52: note = Any amino acid
GXXXXXXXXXXXXXXXXXXXXXXXXXXXXXGXXXXXXXSAXXXXXXXXXXXXG

SEQ ID NO: 797101 - protein, 55 aa, unidentified
  VARIANT 2: note = Any amino acid
  VARIANT 3: note = Any amino acid
  VARIANT 4: note = Any amino acid
  VARIANT 5: note = Any amino acid
  VARIANT 6: note = Any amino acid
  VARIANT 7: note = Any amino acid
  VARIANT 8: note = Any amino acid
  VARIANT 9: note = Any amino acid
  VARIANT 10: note = Any amino acid
  VARIANT 11: note = Any amino acid
  VARIANT 12: note = Any amino acid
  VARIANT 13: note = Any amino acid
  VARIANT 14: note = Any amino acid
  VARIANT 15: note = Any amino acid
  VARIANT 16: note = Any amino acid
  VARIANT 17: note = Any amino acid
  VARIANT 18: note = Any amino acid
  VARIANT 19: note = Any amino acid
  VARIANT 20: note = Any amino acid
  VARIANT 21: note = Any amino acid
  VARIANT 22: note = Any amino acid
  VARIANT 23: note = Any amino acid
  VARIANT 24: note = Any amino acid
  VARIANT 25: note = Any amino acid
  VARIANT 26: note = Any amino acid
  VARIANT 27: note = Any amino acid
  VARIANT 28: note = Any amino acid
  VARIANT 29: note = Any amino acid
  VARIANT 30: note = Any amino acid
  VARIANT 32: note = Any amino acid
  VARIANT 33: note = Any amino acid
  VARIANT 34: note = Any amino acid
  VARIANT 35: note = Any amino acid
  VARIANT 36: note = Any amino acid
  VARIANT 37: note = Any amino acid
  VARIANT 38: note = Any amino acid
  VARIANT 41: note = Any amino acid
  VARIANT 42: note = Any amino acid
  VARIANT 43: note = Any amino acid
  VARIANT 44: note = Any amino acid
  VARIANT 45: note = Any amino acid
  VARIANT 46: note = Any amino acid
  VARIANT 47: note = Any amino acid
  VARIANT 48: note = Any amino acid
  VARIANT 49: note = Any amino acid
  VARIANT 50: note = Any amino acid
  VARIANT 51: note = Any amino acid
  VARIANT 52: note = Any amino acid
  VARIANT 53: note = Any amino acid
  VARIANT 54: note = Any amino acid
GXXXXXXXXXXXXXXXXXXXXXXXXXXXXXGXXXXXXXSGXXXXXXXXXXXXXXG

SEQ ID NO: 797102 - protein, 52 aa, unidentified
  VARIANT 2: note = Any amino acid
  VARIANT 3: note = Any amino acid
  VARIANT 4: note = Any amino acid
  VARIANT 5: note = Any amino acid
  VARIANT 6: note = Any amino acid
  VARIANT 7: note = Any amino acid
  VARIANT 8: note = Any amino acid
  VARIANT 9: note = Any amino acid
  VARIANT 10: note = Any amino acid
  VARIANT 11: note = Any amino acid
  VARIANT 12: note = Any amino acid
  VARIANT 13: note = Any amino acid
  VARIANT 14: note = Any amino acid
  VARIANT 15: note = Any amino acid
  VARIANT 16: note = Any amino acid
  VARIANT 17: note = Any amino acid
  VARIANT 18: note = Any amino acid
  VARIANT 19: note = Any amino acid
  VARIANT 20: note = Any amino acid
  VARIANT 21: note = Any amino acid
  VARIANT 22: note = Any amino acid
  VARIANT 23: note = Any amino acid
  VARIANT 24: note = Any amino acid
  VARIANT 25: note = Any amino acid
  VARIANT 26: note = Any amino acid
  VARIANT 27: note = Any amino acid
  VARIANT 28: note = Any amino acid
  VARIANT 29: note = Any amino acid
  VARIANT 30: note = Any amino acid
  VARIANT 31: note = Any amino acid
  VARIANT 33: note = Any amino acid
  VARIANT 34: note = Any amino acid
  VARIANT 35: note = Any amino acid
  VARIANT 36: note = Any amino acid
  VARIANT 37: note = Any amino acid
  VARIANT 38: note = Any amino acid
  VARIANT 39: note = Any amino acid
  VARIANT 42: note = Any amino acid
  VARIANT 43: note = Any amino acid
  VARIANT 44: note = Any amino acid
  VARIANT 45: note = Any amino acid
  VARIANT 46: note = Any amino acid
  VARIANT 47: note = Any amino acid
  VARIANT 48: note = Any amino acid
  VARIANT 49: note = Any amino acid
  VARIANT 50: note = Any amino acid
  VARIANT 51: note = Any amino acid
GXXXXXXXXXXXXXXXXXXXXXXXXXXXXXXRXXXXXXXSAXXXXXXXXXXG

SEQ ID NO: 797103 - protein, 52 aa, unidentified
  VARIANT 2: note = Any amino acid
  VARIANT 3: note = Any amino acid
  VARIANT 4: note = Any amino acid
  VARIANT 5: note = Any amino acid
  VARIANT 6: note = Any amino acid
  VARIANT 7: note = Any amino acid
  VARIANT 8: note = Any amino acid
  VARIANT 9: note = Any amino acid
  VARIANT 10: note = Any amino acid
  VARIANT 11: note = Any amino acid
  VARIANT 12: note = Any amino acid
  VARIANT 13: note = Any amino acid
  VARIANT 14: note = Any amino acid
  VARIANT 15: note = Any amino acid
  VARIANT 16: note = Any amino acid
  VARIANT 17: note = Any amino acid
  VARIANT 18: note = Any amino acid
  VARIANT 19: note = Any amino acid
  VARIANT 20: note = Any amino acid
  VARIANT 21: note = Any amino acid
  VARIANT 22: note = Any amino acid
  VARIANT 23: note = Any amino acid
  VARIANT 24: note = Any amino acid
  VARIANT 25: note = Any amino acid
  VARIANT 26: note = Any amino acid
  VARIANT 27: note = Any amino acid
  VARIANT 28: note = Any amino acid
  VARIANT 29: note = Any amino acid
  VARIANT 30: note = Any amino acid
  VARIANT 31: note = Any amino acid
  VARIANT 33: note = Any amino acid
  VARIANT 34: note = Any amino acid
  VARIANT 35: note = Any amino acid
  VARIANT 36: note = Any amino acid
  VARIANT 37: note = Any amino acid
  VARIANT 38: note = Any amino acid
  VARIANT 39: note = Any amino acid
  VARIANT 42: note = Any amino acid
  VARIANT 43: note = Any amino acid
  VARIANT 44: note = Any amino acid
  VARIANT 45: note = Any amino acid
  VARIANT 46: note = Any amino acid
  VARIANT 47: note = Any amino acid
  VARIANT 48: note = Any amino acid
  VARIANT 49: note = Any amino acid
  VARIANT 50: note = Any amino acid
  VARIANT 51: note = Any amino acid
GXXXXXXXXXXXXXXXXXXXXXXXXXXXXXXRXXXXXXXSGXXXXXXXXXXG

SEQ ID NO: 797104 - protein, 53 aa, unidentified
  VARIANT 2: note = Any amino acid
  VARIANT 3: note = Any amino acid
  VARIANT 4: note = Any amino acid
  VARIANT 5: note = Any amino acid
  VARIANT 6: note = Any amino acid
  VARIANT 7: note = Any amino acid
  VARIANT 8: note = Any amino acid
  VARIANT 9: note = Any amino acid
  VARIANT 10: note = Any amino acid
  VARIANT 11: note = Any amino acid
  VARIANT 12: note = Any amino acid
  VARIANT 13: note = Any amino acid
  VARIANT 14: note = Any amino acid
  VARIANT 15: note = Any amino acid
  VARIANT 16: note = Any amino acid
  VARIANT 17: note = Any amino acid
  VARIANT 18: note = Any amino acid
  VARIANT 19: note = Any amino acid
  VARIANT 20: note = Any amino acid
  VARIANT 21: note = Any amino acid
  VARIANT 22: note = Any amino acid
  VARIANT 23: note = Any amino acid
  VARIANT 24: note = Any amino acid
  VARIANT 25: note = Any amino acid
  VARIANT 26: note = Any amino acid
  VARIANT 27: note = Any amino acid
  VARIANT 28: note = Any amino acid
  VARIANT 29: note = Any amino acid
  VARIANT 30: note = Any amino acid
  VARIANT 31: note = Any amino acid
  VARIANT 32: note = Any amino acid
  VARIANT 34: note = Any amino acid
  VARIANT 35: note = Any amino acid
  VARIANT 36: note = Any amino acid
  VARIANT 37: note = Any amino acid
  VARIANT 38: note = Any amino acid
  VARIANT 39: note = Any amino acid
  VARIANT 40: note = Any amino acid
  VARIANT 43: note = Any amino acid
  VARIANT 44: note = Any amino acid
  VARIANT 45: note = Any amino acid
  VARIANT 46: note = Any amino acid
  VARIANT 47: note = Any amino acid
  VARIANT 48: note = Any amino acid
  VARIANT 49: note = Any amino acid
  VARIANT 50: note = Any amino acid
  VARIANT 51: note = Any amino acid
  VARIANT 52: note = Any amino acid
GXXXXXXXXXXXXXXXXXXXXXXXXXXXXXXXRXXXXXXXSGXXXXXXXXXXG

SEQ ID NO: 797105 - protein, 53 aa, unidentified
  VARIANT 2: note = Any amino acid
  VARIANT 3: note = Any amino acid
  VARIANT 4: note = Any amino acid
  VARIANT 5: note = Any amino acid
  VARIANT 6: note = Any amino acid
  VARIANT 7: note = Any amino acid
  VARIANT 8: note = Any amino acid
  VARIANT 9: note = Any amino acid
  VARIANT 10: note = Any amino acid
  VARIANT 11: note = Any amino acid
  VARIANT 12: note = Any amino acid
  VARIANT 13: note = Any amino acid
  VARIANT 14: note = Any amino acid
  VARIANT 15: note = Any amino acid
  VARIANT 16: note = Any amino acid
  VARIANT 17: note = Any amino acid
  VARIANT 18: note = Any amino acid
  VARIANT 19: note = Any amino acid
  VARIANT 20: note = Any amino acid
  VARIANT 21: note = Any amino acid
  VARIANT 22: note = Any amino acid
  VARIANT 23: note = Any amino acid
  VARIANT 24: note = Any amino acid
  VARIANT 25: note = Any amino acid
  VARIANT 26: note = Any amino acid
  VARIANT 27: note = Any amino acid
  VARIANT 28: note = Any amino acid
  VARIANT 29: note = Any amino acid
  VARIANT 30: note = Any amino acid
  VARIANT 31: note = Any amino acid
  VARIANT 33: note = Any amino acid
  VARIANT 34: note = Any amino acid
  VARIANT 35: note = Any amino acid
  VARIANT 36: note = Any amino acid
  VARIANT 37: note = Any amino acid
  VARIANT 38: note = Any amino acid
  VARIANT 39: note = Any amino acid
  VARIANT 42: note = Any amino acid
  VARIANT 43: note = Any amino acid
  VARIANT 44: note = Any amino acid
  VARIANT 45: note = Any amino acid
  VARIANT 46: note = Any amino acid
  VARIANT 47: note = Any amino acid
  VARIANT 48: note = Any amino acid
  VARIANT 49: note = Any amino acid
  VARIANT 50: note = Any amino acid
  VARIANT 51: note = Any amino acid
  VARIANT 52: note = Any amino acid
GXXXXXXXXXXXXXXXXXXXXXXXXXXXXXXKXXXXXXXSAXXXXXXXXXXXG

SEQ ID NO: 797106 - protein, 52 aa, unidentified
  VARIANT 2: note = Any amino acid
  VARIANT 3: note = Any amino acid
  VARIANT 4: note = Any amino acid
  VARIANT 5: note = Any amino acid
  VARIANT 6: note = Any amino acid
  VARIANT 7: note = Any amino acid
  VARIANT 8: note = Any amino acid
  VARIANT 9: note = Any amino acid
  VARIANT 10: note = Any amino acid
  VARIANT 11: note = Any amino acid
  VARIANT 12: note = Any amino acid
  VARIANT 13: note = Any amino acid
  VARIANT 14: note = Any amino acid
  VARIANT 15: note = Any amino acid
  VARIANT 16: note = Any amino acid
  VARIANT 17: note = Any amino acid
  VARIANT 18: note = Any amino acid
  VARIANT 19: note = Any amino acid
  VARIANT 20: note = Any amino acid
  VARIANT 21: note = Any amino acid
  VARIANT 22: note = Any amino acid
  VARIANT 23: note = Any amino acid
  VARIANT 24: note = Any amino acid
  VARIANT 25: note = Any amino acid
  VARIANT 26: note = Any amino acid
  VARIANT 27: note = Any amino acid
  VARIANT 28: note = Any amino acid
  VARIANT 29: note = Any amino acid
  VARIANT 30: note = Any amino acid
  VARIANT 31: note = Any amino acid
  VARIANT 33: note = Any amino acid
  VARIANT 34: note = Any amino acid
  VARIANT 35: note = Any amino acid
  VARIANT 36: note = Any amino acid
  VARIANT 37: note = Any amino acid
  VARIANT 38: note = Any amino acid
  VARIANT 39: note = Any amino acid
  VARIANT 42: note = Any amino acid
  VARIANT 43: note = Any amino acid
  VARIANT 44: note = Any amino acid
  VARIANT 45: note = Any amino acid
  VARIANT 46: note = Any amino acid
  VARIANT 47: note = Any amino acid
  VARIANT 48: note = Any amino acid
  VARIANT 49: note = Any amino acid
  VARIANT 50: note = Any amino acid
  VARIANT 51: note = Any amino acid
GXXXXXXXXXXXXXXXXXXXXXXXXXXXXXXAXXXXXXXSGXXXXXXXXXXG

SEQ ID NO: 797107 - protein, 52 aa, unidentified
  VARIANT 2: note = Any amino acid
  VARIANT 3: note = Any amino acid
  VARIANT 4: note = Any amino acid
  VARIANT 5: note = Any amino acid
  VARIANT 6: note = Any amino acid
  VARIANT 7: note = Any amino acid
  VARIANT 8: note = Any amino acid
  VARIANT 9: note = Any amino acid
  VARIANT 10: note = Any amino acid
  VARIANT 11: note = Any amino acid
  VARIANT 12: note = Any amino acid
  VARIANT 13: note = Any amino acid
  VARIANT 14: note = Any amino acid
  VARIANT 15: note = Any amino acid
  VARIANT 16: note = Any amino acid
  VARIANT 17: note = Any amino acid
  VARIANT 18: note = Any amino acid
  VARIANT 19: note = Any amino acid
  VARIANT 20: note = Any amino acid
  VARIANT 21: note = Any amino acid
  VARIANT 22: note = Any amino acid
  VARIANT 23: note = Any amino acid
  VARIANT 24: note = Any amino acid
  VARIANT 25: note = Any amino acid
  VARIANT 26: note = Any amino acid
  VARIANT 27: note = Any amino acid
  VARIANT 28: note = Any amino acid
  VARIANT 29: note = Any amino acid
  VARIANT 31: note = Any amino acid
  VARIANT 32: note = Any amino acid
  VARIANT 33: note = Any amino acid
  VARIANT 34: note = Any amino acid
  VARIANT 35: note = Any amino acid
  VARIANT 36: note = Any amino acid
  VARIANT 37: note = Any amino acid
  VARIANT 40: note = Any amino acid
  VARIANT 41: note = Any amino acid
  VARIANT 42: note = Any amino acid
  VARIANT 43: note = Any amino acid
  VARIANT 44: note = Any amino acid
  VARIANT 45: note = Any amino acid
  VARIANT 46: note = Any amino acid
  VARIANT 47: note = Any amino acid
  VARIANT 48: note = Any amino acid
  VARIANT 49: note = Any amino acid
  VARIANT 50: note = Any amino acid
  VARIANT 51: note = Any amino acid
AXXXXXXXXXXXXXXXXXXXXXXXXXXXXGXXXXXXXSGXXXXXXXXXXXXG

SEQ ID NO: 797108 - protein, 52 aa, unidentified
  VARIANT 2: note = Any amino acid
  VARIANT 3: note = Any amino acid
  VARIANT 4: note = Any amino acid
  VARIANT 5: note = Any amino acid
  VARIANT 6: note = Any amino acid
  VARIANT 7: note = Any amino acid
  VARIANT 8: note = Any amino acid
  VARIANT 9: note = Any amino acid
  VARIANT 10: note = Any amino acid
  VARIANT 11: note = Any amino acid
  VARIANT 12: note = Any amino acid
  VARIANT 13: note = Any amino acid
  VARIANT 14: note = Any amino acid
  VARIANT 15: note = Any amino acid
  VARIANT 16: note = Any amino acid
  VARIANT 17: note = Any amino acid
  VARIANT 18: note = Any amino acid
  VARIANT 19: note = Any amino acid
  VARIANT 20: note = Any amino acid
  VARIANT 21: note = Any amino acid
  VARIANT 22: note = Any amino acid
  VARIANT 23: note = Any amino acid
  VARIANT 24: note = Any amino acid
  VARIANT 25: note = Any amino acid
  VARIANT 26: note = Any amino acid
  VARIANT 27: note = Any amino acid
  VARIANT 28: note = Any amino acid
  VARIANT 29: note = Any amino acid
  VARIANT 30: note = Any amino acid
  VARIANT 31: note = Any amino acid
  VARIANT 33: note = Any amino acid
  VARIANT 34: note = Any amino acid
  VARIANT 35: note = Any amino acid
  VARIANT 36: note = Any amino acid
  VARIANT 37: note = Any amino acid
  VARIANT 38: note = Any amino acid
  VARIANT 39: note = Any amino acid
  VARIANT 42: note = Any amino acid
  VARIANT 43: note = Any amino acid
  VARIANT 44: note = Any amino acid
  VARIANT 45: note = Any amino acid
  VARIANT 46: note = Any amino acid
  VARIANT 47: note = Any amino acid
  VARIANT 48: note = Any amino acid
  VARIANT 49: note = Any amino acid
  VARIANT 50: note = Any amino acid
  VARIANT 51: note = Any amino acid
GXXXXXXXXXXXXXXXXXXXXXXXXXXXXXXCXXXXXXXSAXXXXXXXXXXG

SEQ ID NO: 797109 - protein, 53 aa, unidentified
  VARIANT 2: note = Any amino acid
  VARIANT 3: note = Any amino acid
  VARIANT 4: note = Any amino acid
  VARIANT 5: note = Any amino acid
  VARIANT 6: note = Any amino acid
  VARIANT 7: note = Any amino acid
  VARIANT 8: note = Any amino acid
  VARIANT 9: note = Any amino acid
  VARIANT 10: note = Any amino acid
  VARIANT 11: note = Any amino acid
  VARIANT 12: note = Any amino acid
  VARIANT 13: note = Any amino acid
  VARIANT 14: note = Any amino acid
  VARIANT 15: note = Any amino acid
  VARIANT 16: note = Any amino acid
  VARIANT 17: note = Any amino acid
  VARIANT 18: note = Any amino acid
  VARIANT 19: note = Any amino acid
  VARIANT 20: note = Any amino acid
  VARIANT 21: note = Any amino acid
  VARIANT 22: note = Any amino acid
  VARIANT 23: note = Any amino acid
  VARIANT 24: note = Any amino acid
  VARIANT 25: note = Any amino acid
  VARIANT 26: note = Any amino acid
  VARIANT 27: note = Any amino acid
  VARIANT 28: note = Any amino acid
  VARIANT 29: note = Any amino acid
  VARIANT 30: note = Any amino acid
  VARIANT 32: note = Any amino acid
  VARIANT 33: note = Any amino acid
  VARIANT 34: note = Any amino acid
  VARIANT 35: note = Any amino acid
  VARIANT 36: note = Any amino acid
  VARIANT 37: note = Any amino acid
  VARIANT 38: note = Any amino acid
  VARIANT 41: note = Any amino acid
  VARIANT 42: note = Any amino acid
  VARIANT 43: note = Any amino acid
  VARIANT 44: note = Any amino acid
  VARIANT 45: note = Any amino acid
  VARIANT 46: note = Any amino acid
  VARIANT 47: note = Any amino acid
  VARIANT 48: note = Any amino acid
  VARIANT 49: note = Any amino acid
  VARIANT 50: note = Any amino acid
  VARIANT 51: note = Any amino acid
  VARIANT 52: note = Any amino acid
GXXXXXXXXXXXXXXXXXXXXXXXXXXXXXGXXXXXXXSGXXXXXXXXXXXXS

SEQ ID NO: 797110 - protein, 53 aa, unidentified
  VARIANT 2: note = Any amino acid
  VARIANT 3: note = Any amino acid
  VARIANT 4: note = Any amino acid
  VARIANT 5: note = Any amino acid
  VARIANT 6: note = Any amino acid
  VARIANT 7: note = Any amino acid
  VARIANT 8: note = Any amino acid
  VARIANT 9: note = Any amino acid
  VARIANT 10: note = Any amino acid
  VARIANT 11: note = Any amino acid
  VARIANT 12: note = Any amino acid
  VARIANT 13: note = Any amino acid
  VARIANT 14: note = Any amino acid
  VARIANT 15: note = Any amino acid
  VARIANT 16: note = Any amino acid
  VARIANT 17: note = Any amino acid
  VARIANT 18: note = Any amino acid
  VARIANT 19: note = Any amino acid
  VARIANT 20: note = Any amino acid
  VARIANT 21: note = Any amino acid
  VARIANT 22: note = Any amino acid
  VARIANT 23: note = Any amino acid
  VARIANT 24: note = Any amino acid
  VARIANT 25: note = Any amino acid
  VARIANT 26: note = Any amino acid
  VARIANT 27: note = Any amino acid
  VARIANT 28: note = Any amino acid
  VARIANT 29: note = Any amino acid
  VARIANT 30: note = Any amino acid
  VARIANT 31: note = Any amino acid
  VARIANT 33: note = Any amino acid
  VARIANT 34: note = Any amino acid
  VARIANT 35: note = Any amino acid
  VARIANT 36: note = Any amino acid
  VARIANT 37: note = Any amino acid
  VARIANT 38: note = Any amino acid
  VARIANT 39: note = Any amino acid
  VARIANT 42: note = Any amino acid
  VARIANT 43: note = Any amino acid
  VARIANT 44: note = Any amino acid
  VARIANT 45: note = Any amino acid
  VARIANT 46: note = Any amino acid
  VARIANT 47: note = Any amino acid
  VARIANT 48: note = Any amino acid
  VARIANT 49: note = Any amino acid
  VARIANT 50: note = Any amino acid
  VARIANT 51: note = Any amino acid
  VARIANT 52: note = Any amino acid
GXXXXXXXXXXXXXXXXXXXXXXXXXXXXXXGXXXXXXXSGXXXXXXXXXXXA

SEQ ID NO: 797111 - protein, 51 aa, unidentified
  VARIANT 2: note = Any amino acid
  VARIANT 3: note = Any amino acid
  VARIANT 4: note = Any amino acid
  VARIANT 5: note = Any amino acid
  VARIANT 6: note = Any amino acid
  VARIANT 7: note = Any amino acid
  VARIANT 8: note = Any amino acid
  VARIANT 9: note = Any amino acid
  VARIANT 10: note = Any amino acid
  VARIANT 11: note = Any amino acid
  VARIANT 12: note = Any amino acid
  VARIANT 13: note = Any amino acid
  VARIANT 14: note = Any amino acid
  VARIANT 15: note = Any amino acid
  VARIANT 16: note = Any amino acid
  VARIANT 17: note = Any amino acid
  VARIANT 18: note = Any amino acid
  VARIANT 19: note = Any amino acid
  VARIANT 20: note = Any amino acid
  VARIANT 21: note = Any amino acid
  VARIANT 22: note = Any amino acid
  VARIANT 23: note = Any amino acid
  VARIANT 24: note = Any amino acid
  VARIANT 25: note = Any amino acid
  VARIANT 26: note = Any amino acid
  VARIANT 27: note = Any amino acid
  VARIANT 28: note = Any amino acid
  VARIANT 29: note = Any amino acid
  VARIANT 30: note = Any amino acid
  VARIANT 32: note = Any amino acid
  VARIANT 33: note = Any amino acid
  VARIANT 34: note = Any amino acid
  VARIANT 35: note = Any amino acid
  VARIANT 36: note = Any amino acid
  VARIANT 37: note = Any amino acid
  VARIANT 38: note = Any amino acid
  VARIANT 41: note = Any amino acid
  VARIANT 42: note = Any amino acid
  VARIANT 43: note = Any amino acid
  VARIANT 44: note = Any amino acid
  VARIANT 45: note = Any amino acid
  VARIANT 46: note = Any amino acid
  VARIANT 47: note = Any amino acid
  VARIANT 48: note = Any amino acid
  VARIANT 49: note = Any amino acid
  VARIANT 50: note = Any amino acid
GXXXXXXXXXXXXXXXXXXXXXXXXXXXXXGXXXXXXXSSXXXXXXXXXXG

SEQ ID NO: 797112 - protein, 52 aa, unidentified
  VARIANT 2: note = Any amino acid
  VARIANT 3: note = Any amino acid
  VARIANT 4: note = Any amino acid
  VARIANT 5: note = Any amino acid
  VARIANT 6: note = Any amino acid
  VARIANT 7: note = Any amino acid
  VARIANT 8: note = Any amino acid
  VARIANT 9: note = Any amino acid
  VARIANT 10: note = Any amino acid
  VARIANT 11: note = Any amino acid
  VARIANT 12: note = Any amino acid
  VARIANT 13: note = Any amino acid
  VARIANT 14: note = Any amino acid
  VARIANT 15: note = Any amino acid
  VARIANT 16: note = Any amino acid
  VARIANT 17: note = Any amino acid
  VARIANT 18: note = Any amino acid
  VARIANT 19: note = Any amino acid
  VARIANT 20: note = Any amino acid
  VARIANT 21: note = Any amino acid
  VARIANT 22: note = Any amino acid
  VARIANT 23: note = Any amino acid
  VARIANT 24: note = Any amino acid
  VARIANT 25: note = Any amino acid
  VARIANT 26: note = Any amino acid
  VARIANT 27: note = Any amino acid
  VARIANT 28: note = Any amino acid
  VARIANT 29: note = Any amino acid
  VARIANT 30: note = Any amino acid
  VARIANT 32: note = Any amino acid
  VARIANT 33: note = Any amino acid
  VARIANT 34: note = Any amino acid
  VARIANT 35: note = Any amino acid
  VARIANT 36: note = Any amino acid
  VARIANT 37: note = Any amino acid
  VARIANT 38: note = Any amino acid
  VARIANT 41: note = Any amino acid
  VARIANT 42: note = Any amino acid
  VARIANT 43: note = Any amino acid
  VARIANT 44: note = Any amino acid
  VARIANT 45: note = Any amino acid
  VARIANT 46: note = Any amino acid
  VARIANT 47: note = Any amino acid
  VARIANT 48: note = Any amino acid
  VARIANT 49: note = Any amino acid
  VARIANT 50: note = Any amino acid
  VARIANT 51: note = Any amino acid
AXXXXXXXXXXXXXXXXXXXXXXXXXXXXXGXXXXXXXSGXXXXXXXXXXXG

SEQ ID NO: 797113 - protein, 52 aa, unidentified
  VARIANT 2: note = Any amino acid
  VARIANT 3: note = Any amino acid
  VARIANT 4: note = Any amino acid
  VARIANT 5: note = Any amino acid
  VARIANT 6: note = Any amino acid
  VARIANT 7: note = Any amino acid
  VARIANT 8: note = Any amino acid
  VARIANT 9: note = Any amino acid
  VARIANT 10: note = Any amino acid
  VARIANT 11: note = Any amino acid
  VARIANT 12: note = Any amino acid
  VARIANT 13: note = Any amino acid
  VARIANT 14: note = Any amino acid
  VARIANT 15: note = Any amino acid
  VARIANT 16: note = Any amino acid
  VARIANT 17: note = Any amino acid
  VARIANT 18: note = Any amino acid
  VARIANT 19: note = Any amino acid
  VARIANT 20: note = Any amino acid
  VARIANT 21: note = Any amino acid
  VARIANT 22: note = Any amino acid
  VARIANT 23: note = Any amino acid
  VARIANT 24: note = Any amino acid
  VARIANT 25: note = Any amino acid
  VARIANT 26: note = Any amino acid
  VARIANT 27: note = Any amino acid
  VARIANT 28: note = Any amino acid
  VARIANT 29: note = Any amino acid
  VARIANT 30: note = Any amino acid
  VARIANT 32: note = Any amino acid
  VARIANT 33: note = Any amino acid
  VARIANT 34: note = Any amino acid
  VARIANT 35: note = Any amino acid
  VARIANT 36: note = Any amino acid
  VARIANT 37: note = Any amino acid
  VARIANT 38: note = Any amino acid
  VARIANT 41: note = Any amino acid
  VARIANT 42: note = Any amino acid
  VARIANT 43: note = Any amino acid
  VARIANT 44: note = Any amino acid
  VARIANT 45: note = Any amino acid
  VARIANT 46: note = Any amino acid
  VARIANT 47: note = Any amino acid
  VARIANT 48: note = Any amino acid
  VARIANT 49: note = Any amino acid
  VARIANT 50: note = Any amino acid
  VARIANT 51: note = Any amino acid
GXXXXXXXXXXXXXXXXXXXXXXXXXXXXXGXXXXXXXSGXXXXXXXXXXXY

SEQ ID NO: 797114 - protein, 51 aa, unidentified
  VARIANT 2: note = Any amino acid
  VARIANT 3: note = Any amino acid
  VARIANT 4: note = Any amino acid
  VARIANT 5: note = Any amino acid
  VARIANT 6: note = Any amino acid
  VARIANT 7: note = Any amino acid
  VARIANT 8: note = Any amino acid
  VARIANT 9: note = Any amino acid
  VARIANT 10: note = Any amino acid
  VARIANT 11: note = Any amino acid
  VARIANT 12: note = Any amino acid
  VARIANT 13: note = Any amino acid
  VARIANT 14: note = Any amino acid
  VARIANT 15: note = Any amino acid
  VARIANT 16: note = Any amino acid
  VARIANT 17: note = Any amino acid
  VARIANT 18: note = Any amino acid
  VARIANT 19: note = Any amino acid
  VARIANT 20: note = Any amino acid
  VARIANT 21: note = Any amino acid
  VARIANT 22: note = Any amino acid
  VARIANT 23: note = Any amino acid
  VARIANT 24: note = Any amino acid
  VARIANT 25: note = Any amino acid
  VARIANT 26: note = Any amino acid
  VARIANT 27: note = Any amino acid
  VARIANT 28: note = Any amino acid
  VARIANT 29: note = Any amino acid
  VARIANT 30: note = Any amino acid
  VARIANT 32: note = Any amino acid
  VARIANT 33: note = Any amino acid
  VARIANT 34: note = Any amino acid
  VARIANT 35: note = Any amino acid
  VARIANT 36: note = Any amino acid
  VARIANT 37: note = Any amino acid
  VARIANT 38: note = Any amino acid
  VARIANT 41: note = Any amino acid
  VARIANT 42: note = Any amino acid
  VARIANT 43: note = Any amino acid
  VARIANT 44: note = Any amino acid
  VARIANT 45: note = Any amino acid
  VARIANT 46: note = Any amino acid
  VARIANT 47: note = Any amino acid
  VARIANT 48: note = Any amino acid
  VARIANT 49: note = Any amino acid
  VARIANT 50: note = Any amino acid
GXXXXXXXXXXXXXXXXXXXXXXXXXXXXXAXXXXXXXSGXXXXXXXXXXG

SEQ ID NO: 797115 - protein, 53 aa, unidentified
  VARIANT 2: note = Any amino acid
  VARIANT 3: note = Any amino acid
  VARIANT 4: note = Any amino acid
  VARIANT 5: note = Any amino acid
  VARIANT 6: note = Any amino acid
  VARIANT 7: note = Any amino acid
  VARIANT 8: note = Any amino acid
  VARIANT 9: note = Any amino acid
  VARIANT 10: note = Any amino acid
  VARIANT 11: note = Any amino acid
  VARIANT 12: note = Any amino acid
  VARIANT 13: note = Any amino acid
  VARIANT 14: note = Any amino acid
  VARIANT 15: note = Any amino acid
  VARIANT 16: note = Any amino acid
  VARIANT 17: note = Any amino acid
  VARIANT 18: note = Any amino acid
  VARIANT 19: note = Any amino acid
  VARIANT 20: note = Any amino acid
  VARIANT 21: note = Any amino acid
  VARIANT 22: note = Any amino acid
  VARIANT 23: note = Any amino acid
  VARIANT 24: note = Any amino acid
  VARIANT 25: note = Any amino acid
  VARIANT 26: note = Any amino acid
  VARIANT 27: note = Any amino acid
  VARIANT 28: note = Any amino acid
  VARIANT 29: note = Any amino acid
  VARIANT 30: note = Any amino acid
  VARIANT 32: note = Any amino acid
  VARIANT 33: note = Any amino acid
  VARIANT 34: note = Any amino acid
  VARIANT 35: note = Any amino acid
  VARIANT 36: note = Any amino acid
  VARIANT 37: note = Any amino acid
  VARIANT 38: note = Any amino acid
  VARIANT 41: note = Any amino acid
  VARIANT 42: note = Any amino acid
  VARIANT 43: note = Any amino acid
  VARIANT 44: note = Any amino acid
  VARIANT 45: note = Any amino acid
  VARIANT 46: note = Any amino acid
  VARIANT 47: note = Any amino acid
  VARIANT 48: note = Any amino acid
  VARIANT 49: note = Any amino acid
  VARIANT 50: note = Any amino acid
  VARIANT 51: note = Any amino acid
  VARIANT 52: note = Any amino acid
SXXXXXXXXXXXXXXXXXXXXXXXXXXXXXGXXXXXXXSGXXXXXXXXXXXXG

SEQ ID NO: 797116 - protein, 51 aa, unidentified
  VARIANT 2: note = Any amino acid
  VARIANT 3: note = Any amino acid
  VARIANT 4: note = Any amino acid
  VARIANT 5: note = Any amino acid
  VARIANT 6: note = Any amino acid
  VARIANT 7: note = Any amino acid
  VARIANT 8: note = Any amino acid
  VARIANT 9: note = Any amino acid
  VARIANT 10: note = Any amino acid
  VARIANT 11: note = Any amino acid
  VARIANT 12: note = Any amino acid
  VARIANT 13: note = Any amino acid
  VARIANT 14: note = Any amino acid
  VARIANT 15: note = Any amino acid
  VARIANT 16: note = Any amino acid
  VARIANT 17: note = Any amino acid
  VARIANT 18: note = Any amino acid
  VARIANT 19: note = Any amino acid
  VARIANT 20: note = Any amino acid
  VARIANT 21: note = Any amino acid
  VARIANT 22: note = Any amino acid
  VARIANT 23: note = Any amino acid
  VARIANT 24: note = Any amino acid
  VARIANT 25: note = Any amino acid
  VARIANT 26: note = Any amino acid
  VARIANT 27: note = Any amino acid
  VARIANT 28: note = Any amino acid
  VARIANT 29: note = Any amino acid
  VARIANT 30: note = Any amino acid
  VARIANT 32: note = Any amino acid
  VARIANT 33: note = Any amino acid
  VARIANT 34: note = Any amino acid
  VARIANT 35: note = Any amino acid
  VARIANT 36: note = Any amino acid
  VARIANT 37: note = Any amino acid
  VARIANT 38: note = Any amino acid
  VARIANT 41: note = Any amino acid
  VARIANT 42: note = Any amino acid
  VARIANT 43: note = Any amino acid
  VARIANT 44: note = Any amino acid
  VARIANT 45: note = Any amino acid
  VARIANT 46: note = Any amino acid
  VARIANT 47: note = Any amino acid
  VARIANT 48: note = Any amino acid
  VARIANT 49: note = Any amino acid
  VARIANT 50: note = Any amino acid
GXXXXXXXXXXXXXXXXXXXXXXXXXXXXXGXXXXXXXSGXXXXXXXXXXA

SEQ ID NO: 797117 - protein, 57 aa, unidentified
  VARIANT 2: note = Any amino acid
  VARIANT 3: note = Any amino acid
  VARIANT 4: note = Any amino acid
  VARIANT 5: note = Any amino acid
  VARIANT 6: note = Any amino acid
  VARIANT 7: note = Any amino acid
  VARIANT 8: note = Any amino acid
  VARIANT 9: note = Any amino acid
  VARIANT 10: note = Any amino acid
  VARIANT 11: note = Any amino acid
  VARIANT 12: note = Any amino acid
  VARIANT 13: note = Any amino acid
  VARIANT 14: note = Any amino acid
  VARIANT 15: note = Any amino acid
  VARIANT 16: note = Any amino acid
  VARIANT 17: note = Any amino acid
  VARIANT 18: note = Any amino acid
  VARIANT 19: note = Any amino acid
  VARIANT 20: note = Any amino acid
  VARIANT 21: note = Any amino acid
  VARIANT 22: note = Any amino acid
  VARIANT 23: note = Any amino acid
  VARIANT 24: note = Any amino acid
  VARIANT 25: note = Any amino acid
  VARIANT 26: note = Any amino acid
  VARIANT 27: note = Any amino acid
  VARIANT 28: note = Any amino acid
  VARIANT 29: note = Any amino acid
  VARIANT 30: note = Any amino acid
  VARIANT 31: note = Any amino acid
  VARIANT 32: note = Any amino acid
  VARIANT 33: note = Any amino acid
  VARIANT 34: note = Any amino acid
  VARIANT 36: note = Any amino acid
  VARIANT 37: note = Any amino acid
  VARIANT 38: note = Any amino acid
  VARIANT 39: note = Any amino acid
  VARIANT 40: note = Any amino acid
  VARIANT 41: note = Any amino acid
  VARIANT 42: note = Any amino acid
  VARIANT 45: note = Any amino acid
  VARIANT 46: note = Any amino acid
  VARIANT 47: note = Any amino acid
  VARIANT 48: note = Any amino acid
  VARIANT 49: note = Any amino acid
  VARIANT 50: note = Any amino acid
  VARIANT 51: note = Any amino acid
  VARIANT 52: note = Any amino acid
  VARIANT 53: note = Any amino acid
  VARIANT 54: note = Any amino acid
  VARIANT 55: note = Any amino acid
  VARIANT 56: note = Any amino acid
GXXXXXXXXXXXXXXXXXXXXXXXXXXXXXXXXXGXXXXXXXSGXXXXXXXXXXXXG

SEQ ID NO: 797118 - protein, 53 aa, unidentified
  VARIANT 2: note = Any amino acid
  VARIANT 3: note = Any amino acid
  VARIANT 4: note = Any amino acid
  VARIANT 5: note = Any amino acid
  VARIANT 6: note = Any amino acid
  VARIANT 7: note = Any amino acid
  VARIANT 8: note = Any amino acid
  VARIANT 9: note = Any amino acid
  VARIANT 10: note = Any amino acid
  VARIANT 11: note = Any amino acid
  VARIANT 12: note = Any amino acid
  VARIANT 13: note = Any amino acid
  VARIANT 14: note = Any amino acid
  VARIANT 15: note = Any amino acid
  VARIANT 16: note = Any amino acid
  VARIANT 17: note = Any amino acid
  VARIANT 18: note = Any amino acid
  VARIANT 19: note = Any amino acid
  VARIANT 20: note = Any amino acid
  VARIANT 21: note = Any amino acid
  VARIANT 22: note = Any amino acid
  VARIANT 23: note = Any amino acid
  VARIANT 24: note = Any amino acid
  VARIANT 25: note = Any amino acid
  VARIANT 26: note = Any amino acid
  VARIANT 27: note = Any amino acid
  VARIANT 28: note = Any amino acid
  VARIANT 29: note = Any amino acid
  VARIANT 30: note = Any amino acid
  VARIANT 31: note = Any amino acid
  VARIANT 33: note = Any amino acid
  VARIANT 34: note = Any amino acid
  VARIANT 35: note = Any amino acid
  VARIANT 36: note = Any amino acid
  VARIANT 37: note = Any amino acid
  VARIANT 38: note = Any amino acid
  VARIANT 39: note = Any amino acid
  VARIANT 42: note = Any amino acid
  VARIANT 43: note = Any amino acid
  VARIANT 44: note = Any amino acid
  VARIANT 45: note = Any amino acid
  VARIANT 46: note = Any amino acid
  VARIANT 47: note = Any amino acid
  VARIANT 48: note = Any amino acid
  VARIANT 49: note = Any amino acid
  VARIANT 50: note = Any amino acid
  VARIANT 51: note = Any amino acid
  VARIANT 52: note = Any amino acid
GXXXXXXXXXXXXXXXXXXXXXXXXXXXXXXRXXXXXXXSGXXXXXXXXXXXG

SEQ ID NO: 797119 - protein, 53 aa, unidentified
  VARIANT 2: note = Any amino acid
  VARIANT 3: note = Any amino acid
  VARIANT 4: note = Any amino acid
  VARIANT 5: note = Any amino acid
  VARIANT 6: note = Any amino acid
  VARIANT 7: note = Any amino acid
  VARIANT 8: note = Any amino acid
  VARIANT 9: note = Any amino acid
  VARIANT 10: note = Any amino acid
  VARIANT 11: note = Any amino acid
  VARIANT 12: note = Any amino acid
  VARIANT 13: note = Any amino acid
  VARIANT 14: note = Any amino acid
  VARIANT 15: note = Any amino acid
  VARIANT 16: note = Any amino acid
  VARIANT 17: note = Any amino acid
  VARIANT 18: note = Any amino acid
  VARIANT 19: note = Any amino acid
  VARIANT 20: note = Any amino acid
  VARIANT 21: note = Any amino acid
  VARIANT 22: note = Any amino acid
  VARIANT 23: note = Any amino acid
  VARIANT 24: note = Any amino acid
  VARIANT 25: note = Any amino acid
  VARIANT 26: note = Any amino acid
  VARIANT 27: note = Any amino acid
  VARIANT 28: note = Any amino acid
  VARIANT 29: note = Any amino acid
  VARIANT 30: note = Any amino acid
  VARIANT 32: note = Any amino acid
  VARIANT 33: note = Any amino acid
  VARIANT 34: note = Any amino acid
  VARIANT 35: note = Any amino acid
  VARIANT 36: note = Any amino acid
  VARIANT 37: note = Any amino acid
  VARIANT 38: note = Any amino acid
  VARIANT 41: note = Any amino acid
  VARIANT 42: note = Any amino acid
  VARIANT 43: note = Any amino acid
  VARIANT 44: note = Any amino acid
  VARIANT 45: note = Any amino acid
  VARIANT 46: note = Any amino acid
  VARIANT 47: note = Any amino acid
  VARIANT 48: note = Any amino acid
  VARIANT 49: note = Any amino acid
  VARIANT 50: note = Any amino acid
  VARIANT 51: note = Any amino acid
  VARIANT 52: note = Any amino acid
GXXXXXXXXXXXXXXXXXXXXXXXXXXXXXGXXXXXXXSSXXXXXXXXXXXXG

SEQ ID NO: 797120 - protein, 51 aa, unidentified
  VARIANT 2: note = Any amino acid
  VARIANT 3: note = Any amino acid
  VARIANT 4: note = Any amino acid
  VARIANT 5: note = Any amino acid
  VARIANT 6: note = Any amino acid
  VARIANT 7: note = Any amino acid
  VARIANT 8: note = Any amino acid
  VARIANT 9: note = Any amino acid
  VARIANT 10: note = Any amino acid
  VARIANT 11: note = Any amino acid
  VARIANT 12: note = Any amino acid
  VARIANT 13: note = Any amino acid
  VARIANT 14: note = Any amino acid
  VARIANT 15: note = Any amino acid
  VARIANT 16: note = Any amino acid
  VARIANT 17: note = Any amino acid
  VARIANT 18: note = Any amino acid
  VARIANT 19: note = Any amino acid
  VARIANT 20: note = Any amino acid
  VARIANT 21: note = Any amino acid
  VARIANT 22: note = Any amino acid
  VARIANT 23: note = Any amino acid
  VARIANT 24: note = Any amino acid
  VARIANT 25: note = Any amino acid
  VARIANT 26: note = Any amino acid
  VARIANT 27: note = Any amino acid
  VARIANT 28: note = Any amino acid
  VARIANT 29: note = Any amino acid
  VARIANT 30: note = Any amino acid
  VARIANT 31: note = Any amino acid
  VARIANT 33: note = Any amino acid
  VARIANT 34: note = Any amino acid
  VARIANT 35: note = Any amino acid
  VARIANT 36: note = Any amino acid
  VARIANT 37: note = Any amino acid
  VARIANT 38: note = Any amino acid
  VARIANT 39: note = Any amino acid
  VARIANT 42: note = Any amino acid
  VARIANT 43: note = Any amino acid
  VARIANT 44: note = Any amino acid
  VARIANT 45: note = Any amino acid
  VARIANT 46: note = Any amino acid
  VARIANT 47: note = Any amino acid
  VARIANT 48: note = Any amino acid
  VARIANT 49: note = Any amino acid
  VARIANT 50: note = Any amino acid
GXXXXXXXXXXXXXXXXXXXXXXXXXXXXXXGXXXXXXXSGXXXXXXXXXG

SEQ ID NO: 797121 - protein, 53 aa, unidentified
  VARIANT 2: note = Any amino acid
  VARIANT 3: note = Any amino acid
  VARIANT 4: note = Any amino acid
  VARIANT 5: note = Any amino acid
  VARIANT 6: note = Any amino acid
  VARIANT 7: note = Any amino acid
  VARIANT 8: note = Any amino acid
  VARIANT 9: note = Any amino acid
  VARIANT 10: note = Any amino acid
  VARIANT 11: note = Any amino acid
  VARIANT 12: note = Any amino acid
  VARIANT 13: note = Any amino acid
  VARIANT 14: note = Any amino acid
  VARIANT 15: note = Any amino acid
  VARIANT 16: note = Any amino acid
  VARIANT 17: note = Any amino acid
  VARIANT 18: note = Any amino acid
  VARIANT 19: note = Any amino acid
  VARIANT 20: note = Any amino acid
  VARIANT 21: note = Any amino acid
  VARIANT 22: note = Any amino acid
  VARIANT 23: note = Any amino acid
  VARIANT 24: note = Any amino acid
  VARIANT 25: note = Any amino acid
  VARIANT 26: note = Any amino acid
  VARIANT 27: note = Any amino acid
  VARIANT 28: note = Any amino acid
  VARIANT 29: note = Any amino acid
  VARIANT 30: note = Any amino acid
  VARIANT 31: note = Any amino acid
  VARIANT 33: note = Any amino acid
  VARIANT 34: note = Any amino acid
  VARIANT 35: note = Any amino acid
  VARIANT 36: note = Any amino acid
  VARIANT 37: note = Any amino acid
  VARIANT 38: note = Any amino acid
  VARIANT 39: note = Any amino acid
  VARIANT 42: note = Any amino acid
  VARIANT 43: note = Any amino acid
  VARIANT 44: note = Any amino acid
  VARIANT 45: note = Any amino acid
  VARIANT 46: note = Any amino acid
  VARIANT 47: note = Any amino acid
  VARIANT 48: note = Any amino acid
  VARIANT 49: note = Any amino acid
  VARIANT 50: note = Any amino acid
  VARIANT 51: note = Any amino acid
  VARIANT 52: note = Any amino acid
GXXXXXXXXXXXXXXXXXXXXXXXXXXXXXXGXXXXXXXSAXXXXXXXXXXXG

SEQ ID NO: 797122 - protein, 52 aa, unidentified
  VARIANT 2: note = Any amino acid
  VARIANT 3: note = Any amino acid
  VARIANT 4: note = Any amino acid
  VARIANT 5: note = Any amino acid
  VARIANT 6: note = Any amino acid
  VARIANT 7: note = Any amino acid
  VARIANT 8: note = Any amino acid
  VARIANT 9: note = Any amino acid
  VARIANT 10: note = Any amino acid
  VARIANT 11: note = Any amino acid
  VARIANT 12: note = Any amino acid
  VARIANT 13: note = Any amino acid
  VARIANT 14: note = Any amino acid
  VARIANT 15: note = Any amino acid
  VARIANT 16: note = Any amino acid
  VARIANT 17: note = Any amino acid
  VARIANT 18: note = Any amino acid
  VARIANT 19: note = Any amino acid
  VARIANT 20: note = Any amino acid
  VARIANT 21: note = Any amino acid
  VARIANT 22: note = Any amino acid
  VARIANT 23: note = Any amino acid
  VARIANT 24: note = Any amino acid
  VARIANT 25: note = Any amino acid
  VARIANT 26: note = Any amino acid
  VARIANT 27: note = Any amino acid
  VARIANT 28: note = Any amino acid
  VARIANT 29: note = Any amino acid
  VARIANT 30: note = Any amino acid
  VARIANT 31: note = Any amino acid
  VARIANT 33: note = Any amino acid
  VARIANT 34: note = Any amino acid
  VARIANT 35: note = Any amino acid
  VARIANT 36: note = Any amino acid
  VARIANT 37: note = Any amino acid
  VARIANT 38: note = Any amino acid
  VARIANT 39: note = Any amino acid
  VARIANT 42: note = Any amino acid
  VARIANT 43: note = Any amino acid
  VARIANT 44: note = Any amino acid
  VARIANT 45: note = Any amino acid
  VARIANT 46: note = Any amino acid
  VARIANT 47: note = Any amino acid
  VARIANT 48: note = Any amino acid
  VARIANT 49: note = Any amino acid
  VARIANT 50: note = Any amino acid
  VARIANT 51: note = Any amino acid
GXXXXXXXXXXXXXXXXXXXXXXXXXXXXXXGXXXXXXXTAXXXXXXXXXXG

SEQ ID NO: 797123 - protein, 52 aa, unidentified
  VARIANT 2: note = Any amino acid
  VARIANT 3: note = Any amino acid
  VARIANT 4: note = Any amino acid
  VARIANT 5: note = Any amino acid
  VARIANT 6: note = Any amino acid
  VARIANT 7: note = Any amino acid
  VARIANT 8: note = Any amino acid
  VARIANT 9: note = Any amino acid
  VARIANT 10: note = Any amino acid
  VARIANT 11: note = Any amino acid
  VARIANT 12: note = Any amino acid
  VARIANT 13: note = Any amino acid
  VARIANT 14: note = Any amino acid
  VARIANT 15: note = Any amino acid
  VARIANT 16: note = Any amino acid
  VARIANT 17: note = Any amino acid
  VARIANT 18: note = Any amino acid
  VARIANT 19: note = Any amino acid
  VARIANT 20: note = Any amino acid
  VARIANT 21: note = Any amino acid
  VARIANT 22: note = Any amino acid
  VARIANT 23: note = Any amino acid
  VARIANT 24: note = Any amino acid
  VARIANT 25: note = Any amino acid
  VARIANT 26: note = Any amino acid
  VARIANT 27: note = Any amino acid
  VARIANT 28: note = Any amino acid
  VARIANT 29: note = Any amino acid
  VARIANT 30: note = Any amino acid
  VARIANT 31: note = Any amino acid
  VARIANT 33: note = Any amino acid
  VARIANT 34: note = Any amino acid
  VARIANT 35: note = Any amino acid
  VARIANT 36: note = Any amino acid
  VARIANT 37: note = Any amino acid
  VARIANT 38: note = Any amino acid
  VARIANT 39: note = Any amino acid
  VARIANT 42: note = Any amino acid
  VARIANT 43: note = Any amino acid
  VARIANT 44: note = Any amino acid
  VARIANT 45: note = Any amino acid
  VARIANT 46: note = Any amino acid
  VARIANT 47: note = Any amino acid
  VARIANT 48: note = Any amino acid
  VARIANT 49: note = Any amino acid
  VARIANT 50: note = Any amino acid
  VARIANT 51: note = Any amino acid
GXXXXXXXXXXXXXXXXXXXXXXXXXXXXXXGXXXXXXXSGXXXXXXXXXXS

SEQ ID NO: 797124 - protein, 50 aa, unidentified
  VARIANT 2: note = Any amino acid
  VARIANT 3: note = Any amino acid
  VARIANT 4: note = Any amino acid
  VARIANT 5: note = Any amino acid
  VARIANT 6: note = Any amino acid
  VARIANT 7: note = Any amino acid
  VARIANT 8: note = Any amino acid
  VARIANT 9: note = Any amino acid
  VARIANT 10: note = Any amino acid
  VARIANT 11: note = Any amino acid
  VARIANT 12: note = Any amino acid
  VARIANT 13: note = Any amino acid
  VARIANT 14: note = Any amino acid
  VARIANT 15: note = Any amino acid
  VARIANT 16: note = Any amino acid
  VARIANT 17: note = Any amino acid
  VARIANT 18: note = Any amino acid
  VARIANT 19: note = Any amino acid
  VARIANT 20: note = Any amino acid
  VARIANT 21: note = Any amino acid
  VARIANT 22: note = Any amino acid
  VARIANT 23: note = Any amino acid
  VARIANT 24: note = Any amino acid
  VARIANT 25: note = Any amino acid
  VARIANT 26: note = Any amino acid
  VARIANT 27: note = Any amino acid
  VARIANT 28: note = Any amino acid
  VARIANT 29: note = Any amino acid
  VARIANT 31: note = Any amino acid
  VARIANT 32: note = Any amino acid
  VARIANT 33: note = Any amino acid
  VARIANT 34: note = Any amino acid
  VARIANT 35: note = Any amino acid
  VARIANT 36: note = Any amino acid
  VARIANT 37: note = Any amino acid
  VARIANT 40: note = Any amino acid
  VARIANT 41: note = Any amino acid
  VARIANT 42: note = Any amino acid
  VARIANT 43: note = Any amino acid
  VARIANT 44: note = Any amino acid
  VARIANT 45: note = Any amino acid
  VARIANT 46: note = Any amino acid
  VARIANT 47: note = Any amino acid
  VARIANT 48: note = Any amino acid
  VARIANT 49: note = Any amino acid
AXXXXXXXXXXXXXXXXXXXXXXXXXXXXGXXXXXXXSGXXXXXXXXXXG

SEQ ID NO: 797125 - protein, 55 aa, unidentified
  VARIANT 2: note = Any amino acid
  VARIANT 3: note = Any amino acid
  VARIANT 4: note = Any amino acid
  VARIANT 5: note = Any amino acid
  VARIANT 6: note = Any amino acid
  VARIANT 7: note = Any amino acid
  VARIANT 8: note = Any amino acid
  VARIANT 9: note = Any amino acid
  VARIANT 10: note = Any amino acid
  VARIANT 11: note = Any amino acid
  VARIANT 12: note = Any amino acid
  VARIANT 13: note = Any amino acid
  VARIANT 14: note = Any amino acid
  VARIANT 15: note = Any amino acid
  VARIANT 16: note = Any amino acid
  VARIANT 17: note = Any amino acid
  VARIANT 18: note = Any amino acid
  VARIANT 19: note = Any amino acid
  VARIANT 20: note = Any amino acid
  VARIANT 21: note = Any amino acid
  VARIANT 22: note = Any amino acid
  VARIANT 23: note = Any amino acid
  VARIANT 24: note = Any amino acid
  VARIANT 25: note = Any amino acid
  VARIANT 26: note = Any amino acid
  VARIANT 27: note = Any amino acid
  VARIANT 28: note = Any amino acid
  VARIANT 29: note = Any amino acid
  VARIANT 30: note = Any amino acid
  VARIANT 32: note = Any amino acid
  VARIANT 33: note = Any amino acid
  VARIANT 34: note = Any amino acid
  VARIANT 35: note = Any amino acid
  VARIANT 36: note = Any amino acid
  VARIANT 37: note = Any amino acid
  VARIANT 38: note = Any amino acid
  VARIANT 41: note = Any amino acid
  VARIANT 42: note = Any amino acid
  VARIANT 43: note = Any amino acid
  VARIANT 44: note = Any amino acid
  VARIANT 45: note = Any amino acid
  VARIANT 46: note = Any amino acid
  VARIANT 47: note = Any amino acid
  VARIANT 48: note = Any amino acid
  VARIANT 49: note = Any amino acid
  VARIANT 50: note = Any amino acid
  VARIANT 51: note = Any amino acid
  VARIANT 52: note = Any amino acid
  VARIANT 53: note = Any amino acid
  VARIANT 54: note = Any amino acid
GXXXXXXXXXXXXXXXXXXXXXXXXXXXXXGXXXXXXXTGXXXXXXXXXXXXXXC

SEQ ID NO: 797126 - protein, 53 aa, unidentified
  VARIANT 2: note = Any amino acid
  VARIANT 3: note = Any amino acid
  VARIANT 4: note = Any amino acid
  VARIANT 5: note = Any amino acid
  VARIANT 6: note = Any amino acid
  VARIANT 7: note = Any amino acid
  VARIANT 8: note = Any amino acid
  VARIANT 9: note = Any amino acid
  VARIANT 10: note = Any amino acid
  VARIANT 11: note = Any amino acid
  VARIANT 12: note = Any amino acid
  VARIANT 13: note = Any amino acid
  VARIANT 14: note = Any amino acid
  VARIANT 15: note = Any amino acid
  VARIANT 16: note = Any amino acid
  VARIANT 17: note = Any amino acid
  VARIANT 18: note = Any amino acid
  VARIANT 19: note = Any amino acid
  VARIANT 20: note = Any amino acid
  VARIANT 21: note = Any amino acid
  VARIANT 22: note = Any amino acid
  VARIANT 23: note = Any amino acid
  VARIANT 24: note = Any amino acid
  VARIANT 25: note = Any amino acid
  VARIANT 26: note = Any amino acid
  VARIANT 27: note = Any amino acid
  VARIANT 28: note = Any amino acid
  VARIANT 29: note = Any amino acid
  VARIANT 30: note = Any amino acid
  VARIANT 31: note = Any amino acid
  VARIANT 33: note = Any amino acid
  VARIANT 34: note = Any amino acid
  VARIANT 35: note = Any amino acid
  VARIANT 36: note = Any amino acid
  VARIANT 37: note = Any amino acid
  VARIANT 38: note = Any amino acid
  VARIANT 39: note = Any amino acid
  VARIANT 42: note = Any amino acid
  VARIANT 43: note = Any amino acid
  VARIANT 44: note = Any amino acid
  VARIANT 45: note = Any amino acid
  VARIANT 46: note = Any amino acid
  VARIANT 47: note = Any amino acid
  VARIANT 48: note = Any amino acid
  VARIANT 49: note = Any amino acid
  VARIANT 50: note = Any amino acid
  VARIANT 51: note = Any amino acid
  VARIANT 52: note = Any amino acid
GXXXXXXXXXXXXXXXXXXXXXXXXXXXXXXTXXXXXXXSGXXXXXXXXXXXA

SEQ ID NO: 797127 - protein, 53 aa, unidentified
  VARIANT 2: note = Any amino acid
  VARIANT 3: note = Any amino acid
  VARIANT 4: note = Any amino acid
  VARIANT 5: note = Any amino acid
  VARIANT 6: note = Any amino acid
  VARIANT 7: note = Any amino acid
  VARIANT 8: note = Any amino acid
  VARIANT 9: note = Any amino acid
  VARIANT 10: note = Any amino acid
  VARIANT 11: note = Any amino acid
  VARIANT 12: note = Any amino acid
  VARIANT 13: note = Any amino acid
  VARIANT 14: note = Any amino acid
  VARIANT 15: note = Any amino acid
  VARIANT 16: note = Any amino acid
  VARIANT 17: note = Any amino acid
  VARIANT 18: note = Any amino acid
  VARIANT 19: note = Any amino acid
  VARIANT 20: note = Any amino acid
  VARIANT 21: note = Any amino acid
  VARIANT 22: note = Any amino acid
  VARIANT 23: note = Any amino acid
  VARIANT 24: note = Any amino acid
  VARIANT 25: note = Any amino acid
  VARIANT 26: note = Any amino acid
  VARIANT 27: note = Any amino acid
  VARIANT 28: note = Any amino acid
  VARIANT 29: note = Any amino acid
  VARIANT 30: note = Any amino acid
  VARIANT 31: note = Any amino acid
  VARIANT 32: note = Any amino acid
  VARIANT 34: note = Any amino acid
  VARIANT 35: note = Any amino acid
  VARIANT 36: note = Any amino acid
  VARIANT 37: note = Any amino acid
  VARIANT 38: note = Any amino acid
  VARIANT 39: note = Any amino acid
  VARIANT 40: note = Any amino acid
  VARIANT 43: note = Any amino acid
  VARIANT 44: note = Any amino acid
  VARIANT 45: note = Any amino acid
  VARIANT 46: note = Any amino acid
  VARIANT 47: note = Any amino acid
  VARIANT 48: note = Any amino acid
  VARIANT 49: note = Any amino acid
  VARIANT 50: note = Any amino acid
  VARIANT 51: note = Any amino acid
  VARIANT 52: note = Any amino acid
GXXXXXXXXXXXXXXXXXXXXXXXXXXXXXXXGXXXXXXXSAXXXXXXXXXXA

SEQ ID NO: 797128 - protein, 52 aa, unidentified
  VARIANT 2: note = Any amino acid
  VARIANT 3: note = Any amino acid
  VARIANT 4: note = Any amino acid
  VARIANT 5: note = Any amino acid
  VARIANT 6: note = Any amino acid
  VARIANT 7: note = Any amino acid
  VARIANT 8: note = Any amino acid
  VARIANT 9: note = Any amino acid
  VARIANT 10: note = Any amino acid
  VARIANT 11: note = Any amino acid
  VARIANT 12: note = Any amino acid
  VARIANT 13: note = Any amino acid
  VARIANT 14: note = Any amino acid
  VARIANT 15: note = Any amino acid
  VARIANT 16: note = Any amino acid
  VARIANT 17: note = Any amino acid
  VARIANT 18: note = Any amino acid
  VARIANT 19: note = Any amino acid
  VARIANT 20: note = Any amino acid
  VARIANT 21: note = Any amino acid
  VARIANT 22: note = Any amino acid
  VARIANT 23: note = Any amino acid
  VARIANT 24: note = Any amino acid
  VARIANT 25: note = Any amino acid
  VARIANT 26: note = Any amino acid
  VARIANT 27: note = Any amino acid
  VARIANT 28: note = Any amino acid
  VARIANT 29: note = Any amino acid
  VARIANT 30: note = Any amino acid
  VARIANT 31: note = Any amino acid
  VARIANT 33: note = Any amino acid
  VARIANT 34: note = Any amino acid
  VARIANT 35: note = Any amino acid
  VARIANT 36: note = Any amino acid
  VARIANT 37: note = Any amino acid
  VARIANT 38: note = Any amino acid
  VARIANT 39: note = Any amino acid
  VARIANT 42: note = Any amino acid
  VARIANT 43: note = Any amino acid
  VARIANT 44: note = Any amino acid
  VARIANT 45: note = Any amino acid
  VARIANT 46: note = Any amino acid
  VARIANT 47: note = Any amino acid
  VARIANT 48: note = Any amino acid
  VARIANT 49: note = Any amino acid
  VARIANT 50: note = Any amino acid
  VARIANT 51: note = Any amino acid
RXXXXXXXXXXXXXXXXXXXXXXXXXXXXXXGXXXXXXXSGXXXXXXXXXXA

SEQ ID NO: 797129 - protein, 53 aa, unidentified
  VARIANT 2: note = Any amino acid
  VARIANT 3: note = Any amino acid
  VARIANT 4: note = Any amino acid
  VARIANT 5: note = Any amino acid
  VARIANT 6: note = Any amino acid
  VARIANT 7: note = Any amino acid
  VARIANT 8: note = Any amino acid
  VARIANT 9: note = Any amino acid
  VARIANT 10: note = Any amino acid
  VARIANT 11: note = Any amino acid
  VARIANT 12: note = Any amino acid
  VARIANT 13: note = Any amino acid
  VARIANT 14: note = Any amino acid
  VARIANT 15: note = Any amino acid
  VARIANT 16: note = Any amino acid
  VARIANT 17: note = Any amino acid
  VARIANT 18: note = Any amino acid
  VARIANT 19: note = Any amino acid
  VARIANT 20: note = Any amino acid
  VARIANT 21: note = Any amino acid
  VARIANT 22: note = Any amino acid
  VARIANT 23: note = Any amino acid
  VARIANT 24: note = Any amino acid
  VARIANT 25: note = Any amino acid
  VARIANT 26: note = Any amino acid
  VARIANT 27: note = Any amino acid
  VARIANT 28: note = Any amino acid
  VARIANT 29: note = Any amino acid
  VARIANT 30: note = Any amino acid
  VARIANT 32: note = Any amino acid
  VARIANT 33: note = Any amino acid
  VARIANT 34: note = Any amino acid
  VARIANT 35: note = Any amino acid
  VARIANT 36: note = Any amino acid
  VARIANT 37: note = Any amino acid
  VARIANT 38: note = Any amino acid
  VARIANT 41: note = Any amino acid
  VARIANT 42: note = Any amino acid
  VARIANT 43: note = Any amino acid
  VARIANT 44: note = Any amino acid
  VARIANT 45: note = Any amino acid
  VARIANT 46: note = Any amino acid
  VARIANT 47: note = Any amino acid
  VARIANT 48: note = Any amino acid
  VARIANT 49: note = Any amino acid
  VARIANT 50: note = Any amino acid
  VARIANT 51: note = Any amino acid
  VARIANT 52: note = Any amino acid
GXXXXXXXXXXXXXXXXXXXXXXXXXXXXXGXXXXXXXSDXXXXXXXXXXXXA

SEQ ID NO: 797130 - protein, 52 aa, unidentified
  VARIANT 2: note = Any amino acid
  VARIANT 3: note = Any amino acid
  VARIANT 4: note = Any amino acid
  VARIANT 5: note = Any amino acid
  VARIANT 6: note = Any amino acid
  VARIANT 7: note = Any amino acid
  VARIANT 8: note = Any amino acid
  VARIANT 9: note = Any amino acid
  VARIANT 10: note = Any amino acid
  VARIANT 11: note = Any amino acid
  VARIANT 12: note = Any amino acid
  VARIANT 13: note = Any amino acid
  VARIANT 14: note = Any amino acid
  VARIANT 15: note = Any amino acid
  VARIANT 16: note = Any amino acid
  VARIANT 17: note = Any amino acid
  VARIANT 18: note = Any amino acid
  VARIANT 19: note = Any amino acid
  VARIANT 20: note = Any amino acid
  VARIANT 21: note = Any amino acid
  VARIANT 22: note = Any amino acid
  VARIANT 23: note = Any amino acid
  VARIANT 24: note = Any amino acid
  VARIANT 25: note = Any amino acid
  VARIANT 26: note = Any amino acid
  VARIANT 27: note = Any amino acid
  VARIANT 28: note = Any amino acid
  VARIANT 29: note = Any amino acid
  VARIANT 30: note = Any amino acid
  VARIANT 31: note = Any amino acid
  VARIANT 33: note = Any amino acid
  VARIANT 34: note = Any amino acid
  VARIANT 35: note = Any amino acid
  VARIANT 36: note = Any amino acid
  VARIANT 37: note = Any amino acid
  VARIANT 38: note = Any amino acid
  VARIANT 39: note = Any amino acid
  VARIANT 42: note = Any amino acid
  VARIANT 43: note = Any amino acid
  VARIANT 44: note = Any amino acid
  VARIANT 45: note = Any amino acid
  VARIANT 46: note = Any amino acid
  VARIANT 47: note = Any amino acid
  VARIANT 48: note = Any amino acid
  VARIANT 49: note = Any amino acid
  VARIANT 50: note = Any amino acid
  VARIANT 51: note = Any amino acid
GXXXXXXXXXXXXXXXXXXXXXXXXXXXXXXGXXXXXXXSGXXXXXXXXXXK

SEQ ID NO: 797131 - protein, 50 aa, unidentified
  VARIANT 2: note = Any amino acid
  VARIANT 3: note = Any amino acid
  VARIANT 4: note = Any amino acid
  VARIANT 5: note = Any amino acid
  VARIANT 6: note = Any amino acid
  VARIANT 7: note = Any amino acid
  VARIANT 8: note = Any amino acid
  VARIANT 9: note = Any amino acid
  VARIANT 10: note = Any amino acid
  VARIANT 11: note = Any amino acid
  VARIANT 12: note = Any amino acid
  VARIANT 13: note = Any amino acid
  VARIANT 14: note = Any amino acid
  VARIANT 15: note = Any amino acid
  VARIANT 16: note = Any amino acid
  VARIANT 17: note = Any amino acid
  VARIANT 18: note = Any amino acid
  VARIANT 19: note = Any amino acid
  VARIANT 20: note = Any amino acid
  VARIANT 21: note = Any amino acid
  VARIANT 22: note = Any amino acid
  VARIANT 23: note = Any amino acid
  VARIANT 24: note = Any amino acid
  VARIANT 25: note = Any amino acid
  VARIANT 26: note = Any amino acid
  VARIANT 27: note = Any amino acid
  VARIANT 28: note = Any amino acid
  VARIANT 29: note = Any amino acid
  VARIANT 31: note = Any amino acid
  VARIANT 32: note = Any amino acid
  VARIANT 33: note = Any amino acid
  VARIANT 34: note = Any amino acid
  VARIANT 35: note = Any amino acid
  VARIANT 36: note = Any amino acid
  VARIANT 37: note = Any amino acid
  VARIANT 40: note = Any amino acid
  VARIANT 41: note = Any amino acid
  VARIANT 42: note = Any amino acid
  VARIANT 43: note = Any amino acid
  VARIANT 44: note = Any amino acid
  VARIANT 45: note = Any amino acid
  VARIANT 46: note = Any amino acid
  VARIANT 47: note = Any amino acid
  VARIANT 48: note = Any amino acid
  VARIANT 49: note = Any amino acid
GXXXXXXXXXXXXXXXXXXXXXXXXXXXXGXXXXXXXTGXXXXXXXXXXG

SEQ ID NO: 797132 - protein, 53 aa, unidentified
  VARIANT 2: note = Any amino acid
  VARIANT 3: note = Any amino acid
  VARIANT 4: note = Any amino acid
  VARIANT 5: note = Any amino acid
  VARIANT 6: note = Any amino acid
  VARIANT 7: note = Any amino acid
  VARIANT 8: note = Any amino acid
  VARIANT 9: note = Any amino acid
  VARIANT 10: note = Any amino acid
  VARIANT 11: note = Any amino acid
  VARIANT 12: note = Any amino acid
  VARIANT 13: note = Any amino acid
  VARIANT 14: note = Any amino acid
  VARIANT 15: note = Any amino acid
  VARIANT 16: note = Any amino acid
  VARIANT 17: note = Any amino acid
  VARIANT 18: note = Any amino acid
  VARIANT 19: note = Any amino acid
  VARIANT 20: note = Any amino acid
  VARIANT 21: note = Any amino acid
  VARIANT 22: note = Any amino acid
  VARIANT 23: note = Any amino acid
  VARIANT 24: note = Any amino acid
  VARIANT 25: note = Any amino acid
  VARIANT 26: note = Any amino acid
  VARIANT 27: note = Any amino acid
  VARIANT 28: note = Any amino acid
  VARIANT 29: note = Any amino acid
  VARIANT 30: note = Any amino acid
  VARIANT 31: note = Any amino acid
  VARIANT 33: note = Any amino acid
  VARIANT 34: note = Any amino acid
  VARIANT 35: note = Any amino acid
  VARIANT 36: note = Any amino acid
  VARIANT 37: note = Any amino acid
  VARIANT 38: note = Any amino acid
  VARIANT 39: note = Any amino acid
  VARIANT 42: note = Any amino acid
  VARIANT 43: note = Any amino acid
  VARIANT 44: note = Any amino acid
  VARIANT 45: note = Any amino acid
  VARIANT 46: note = Any amino acid
  VARIANT 47: note = Any amino acid
  VARIANT 48: note = Any amino acid
  VARIANT 49: note = Any amino acid
  VARIANT 50: note = Any amino acid
  VARIANT 51: note = Any amino acid
  VARIANT 52: note = Any amino acid
GXXXXXXXXXXXXXXXXXXXXXXXXXXXXXXNXXXXXXXSGXXXXXXXXXXXK

SEQ ID NO: 797133 - protein, 52 aa, unidentified
  VARIANT 2: note = Any amino acid
  VARIANT 3: note = Any amino acid
  VARIANT 4: note = Any amino acid
  VARIANT 5: note = Any amino acid
  VARIANT 6: note = Any amino acid
  VARIANT 7: note = Any amino acid
  VARIANT 8: note = Any amino acid
  VARIANT 9: note = Any amino acid
  VARIANT 10: note = Any amino acid
  VARIANT 11: note = Any amino acid
  VARIANT 12: note = Any amino acid
  VARIANT 13: note = Any amino acid
  VARIANT 14: note = Any amino acid
  VARIANT 15: note = Any amino acid
  VARIANT 16: note = Any amino acid
  VARIANT 17: note = Any amino acid
  VARIANT 18: note = Any amino acid
  VARIANT 19: note = Any amino acid
  VARIANT 20: note = Any amino acid
  VARIANT 21: note = Any amino acid
  VARIANT 22: note = Any amino acid
  VARIANT 23: note = Any amino acid
  VARIANT 24: note = Any amino acid
  VARIANT 25: note = Any amino acid
  VARIANT 26: note = Any amino acid
  VARIANT 27: note = Any amino acid
  VARIANT 28: note = Any amino acid
  VARIANT 29: note = Any amino acid
  VARIANT 30: note = Any amino acid
  VARIANT 31: note = Any amino acid
  VARIANT 33: note = Any amino acid
  VARIANT 34: note = Any amino acid
  VARIANT 35: note = Any amino acid
  VARIANT 36: note = Any amino acid
  VARIANT 37: note = Any amino acid
  VARIANT 38: note = Any amino acid
  VARIANT 39: note = Any amino acid
  VARIANT 42: note = Any amino acid
  VARIANT 43: note = Any amino acid
  VARIANT 44: note = Any amino acid
  VARIANT 45: note = Any amino acid
  VARIANT 46: note = Any amino acid
  VARIANT 47: note = Any amino acid
  VARIANT 48: note = Any amino acid
  VARIANT 49: note = Any amino acid
  VARIANT 50: note = Any amino acid
  VARIANT 51: note = Any amino acid
GXXXXXXXXXXXXXXXXXXXXXXXXXXXXXXGXXXXXXXSAXXXXXXXXXXR

SEQ ID NO: 797134 - protein, 52 aa, unidentified
  VARIANT 2: note = Any amino acid
  VARIANT 3: note = Any amino acid
  VARIANT 4: note = Any amino acid
  VARIANT 5: note = Any amino acid
  VARIANT 6: note = Any amino acid
  VARIANT 7: note = Any amino acid
  VARIANT 8: note = Any amino acid
  VARIANT 9: note = Any amino acid
  VARIANT 10: note = Any amino acid
  VARIANT 11: note = Any amino acid
  VARIANT 12: note = Any amino acid
  VARIANT 13: note = Any amino acid
  VARIANT 14: note = Any amino acid
  VARIANT 15: note = Any amino acid
  VARIANT 16: note = Any amino acid
  VARIANT 17: note = Any amino acid
  VARIANT 18: note = Any amino acid
  VARIANT 19: note = Any amino acid
  VARIANT 20: note = Any amino acid
  VARIANT 21: note = Any amino acid
  VARIANT 22: note = Any amino acid
  VARIANT 23: note = Any amino acid
  VARIANT 24: note = Any amino acid
  VARIANT 25: note = Any amino acid
  VARIANT 26: note = Any amino acid
  VARIANT 27: note = Any amino acid
  VARIANT 28: note = Any amino acid
  VARIANT 29: note = Any amino acid
  VARIANT 30: note = Any amino acid
  VARIANT 32: note = Any amino acid
  VARIANT 33: note = Any amino acid
  VARIANT 34: note = Any amino acid
  VARIANT 35: note = Any amino acid
  VARIANT 36: note = Any amino acid
  VARIANT 37: note = Any amino acid
  VARIANT 38: note = Any amino acid
  VARIANT 41: note = Any amino acid
  VARIANT 42: note = Any amino acid
  VARIANT 43: note = Any amino acid
  VARIANT 44: note = Any amino acid
  VARIANT 45: note = Any amino acid
  VARIANT 46: note = Any amino acid
  VARIANT 47: note = Any amino acid
  VARIANT 48: note = Any amino acid
  VARIANT 49: note = Any amino acid
  VARIANT 50: note = Any amino acid
  VARIANT 51: note = Any amino acid
VXXXXXXXXXXXXXXXXXXXXXXXXXXXXXGXXXXXXXSGXXXXXXXXXXXG

SEQ ID NO: 797135 - protein, 53 aa, unidentified
  VARIANT 2: note = Any amino acid
  VARIANT 3: note = Any amino acid
  VARIANT 4: note = Any amino acid
  VARIANT 5: note = Any amino acid
  VARIANT 6: note = Any amino acid
  VARIANT 7: note = Any amino acid
  VARIANT 8: note = Any amino acid
  VARIANT 9: note = Any amino acid
  VARIANT 10: note = Any amino acid
  VARIANT 11: note = Any amino acid
  VARIANT 12: note = Any amino acid
  VARIANT 13: note = Any amino acid
  VARIANT 14: note = Any amino acid
  VARIANT 15: note = Any amino acid
  VARIANT 16: note = Any amino acid
  VARIANT 17: note = Any amino acid
  VARIANT 18: note = Any amino acid
  VARIANT 19: note = Any amino acid
  VARIANT 20: note = Any amino acid
  VARIANT 21: note = Any amino acid
  VARIANT 22: note = Any amino acid
  VARIANT 23: note = Any amino acid
  VARIANT 24: note = Any amino acid
  VARIANT 25: note = Any amino acid
  VARIANT 26: note = Any amino acid
  VARIANT 27: note = Any amino acid
  VARIANT 28: note = Any amino acid
  VARIANT 29: note = Any amino acid
  VARIANT 30: note = Any amino acid
  VARIANT 31: note = Any amino acid
  VARIANT 33: note = Any amino acid
  VARIANT 34: note = Any amino acid
  VARIANT 35: note = Any amino acid
  VARIANT 36: note = Any amino acid
  VARIANT 37: note = Any amino acid
  VARIANT 38: note = Any amino acid
  VARIANT 39: note = Any amino acid
  VARIANT 42: note = Any amino acid
  VARIANT 43: note = Any amino acid
  VARIANT 44: note = Any amino acid
  VARIANT 45: note = Any amino acid
  VARIANT 46: note = Any amino acid
  VARIANT 47: note = Any amino acid
  VARIANT 48: note = Any amino acid
  VARIANT 49: note = Any amino acid
  VARIANT 50: note = Any amino acid
  VARIANT 51: note = Any amino acid
  VARIANT 52: note = Any amino acid
AXXXXXXXXXXXXXXXXXXXXXXXXXXXXXXTXXXXXXXSGXXXXXXXXXXXA

SEQ ID NO: 797136 - protein, 53 aa, unidentified
  VARIANT 2: note = Any amino acid
  VARIANT 3: note = Any amino acid
  VARIANT 4: note = Any amino acid
  VARIANT 5: note = Any amino acid
  VARIANT 6: note = Any amino acid
  VARIANT 7: note = Any amino acid
  VARIANT 8: note = Any amino acid
  VARIANT 9: note = Any amino acid
  VARIANT 10: note = Any amino acid
  VARIANT 11: note = Any amino acid
  VARIANT 12: note = Any amino acid
  VARIANT 13: note = Any amino acid
  VARIANT 14: note = Any amino acid
  VARIANT 15: note = Any amino acid
  VARIANT 16: note = Any amino acid
  VARIANT 17: note = Any amino acid
  VARIANT 18: note = Any amino acid
  VARIANT 19: note = Any amino acid
  VARIANT 20: note = Any amino acid
  VARIANT 21: note = Any amino acid
  VARIANT 22: note = Any amino acid
  VARIANT 23: note = Any amino acid
  VARIANT 24: note = Any amino acid
  VARIANT 25: note = Any amino acid
  VARIANT 26: note = Any amino acid
  VARIANT 27: note = Any amino acid
  VARIANT 28: note = Any amino acid
  VARIANT 29: note = Any amino acid
  VARIANT 30: note = Any amino acid
  VARIANT 32: note = Any amino acid
  VARIANT 33: note = Any amino acid
  VARIANT 34: note = Any amino acid
  VARIANT 35: note = Any amino acid
  VARIANT 36: note = Any amino acid
  VARIANT 37: note = Any amino acid
  VARIANT 38: note = Any amino acid
  VARIANT 41: note = Any amino acid
  VARIANT 42: note = Any amino acid
  VARIANT 43: note = Any amino acid
  VARIANT 44: note = Any amino acid
  VARIANT 45: note = Any amino acid
  VARIANT 46: note = Any amino acid
  VARIANT 47: note = Any amino acid
  VARIANT 48: note = Any amino acid
  VARIANT 49: note = Any amino acid
  VARIANT 50: note = Any amino acid
  VARIANT 51: note = Any amino acid
  VARIANT 52: note = Any amino acid
AXXXXXXXXXXXXXXXXXXXXXXXXXXXXXGXXXXXXXSGXXXXXXXXXXXXG

SEQ ID NO: 797137 - protein, 52 aa, unidentified
  VARIANT 2: note = Any amino acid
  VARIANT 3: note = Any amino acid
  VARIANT 4: note = Any amino acid
  VARIANT 5: note = Any amino acid
  VARIANT 6: note = Any amino acid
  VARIANT 7: note = Any amino acid
  VARIANT 8: note = Any amino acid
  VARIANT 9: note = Any amino acid
  VARIANT 10: note = Any amino acid
  VARIANT 11: note = Any amino acid
  VARIANT 12: note = Any amino acid
  VARIANT 13: note = Any amino acid
  VARIANT 14: note = Any amino acid
  VARIANT 15: note = Any amino acid
  VARIANT 16: note = Any amino acid
  VARIANT 17: note = Any amino acid
  VARIANT 18: note = Any amino acid
  VARIANT 19: note = Any amino acid
  VARIANT 20: note = Any amino acid
  VARIANT 21: note = Any amino acid
  VARIANT 22: note = Any amino acid
  VARIANT 23: note = Any amino acid
  VARIANT 24: note = Any amino acid
  VARIANT 25: note = Any amino acid
  VARIANT 26: note = Any amino acid
  VARIANT 27: note = Any amino acid
  VARIANT 28: note = Any amino acid
  VARIANT 29: note = Any amino acid
  VARIANT 30: note = Any amino acid
  VARIANT 32: note = Any amino acid
  VARIANT 33: note = Any amino acid
  VARIANT 34: note = Any amino acid
  VARIANT 35: note = Any amino acid
  VARIANT 36: note = Any amino acid
  VARIANT 37: note = Any amino acid
  VARIANT 38: note = Any amino acid
  VARIANT 41: note = Any amino acid
  VARIANT 42: note = Any amino acid
  VARIANT 43: note = Any amino acid
  VARIANT 44: note = Any amino acid
  VARIANT 45: note = Any amino acid
  VARIANT 46: note = Any amino acid
  VARIANT 47: note = Any amino acid
  VARIANT 48: note = Any amino acid
  VARIANT 49: note = Any amino acid
  VARIANT 50: note = Any amino acid
  VARIANT 51: note = Any amino acid
EXXXXXXXXXXXXXXXXXXXXXXXXXXXXXGXXXXXXXSGXXXXXXXXXXXG

SEQ ID NO: 797138 - protein, 54 aa, unidentified
  VARIANT 2: note = Any amino acid
  VARIANT 3: note = Any amino acid
  VARIANT 4: note = Any amino acid
  VARIANT 5: note = Any amino acid
  VARIANT 6: note = Any amino acid
  VARIANT 7: note = Any amino acid
  VARIANT 8: note = Any amino acid
  VARIANT 9: note = Any amino acid
  VARIANT 10: note = Any amino acid
  VARIANT 11: note = Any amino acid
  VARIANT 12: note = Any amino acid
  VARIANT 13: note = Any amino acid
  VARIANT 14: note = Any amino acid
  VARIANT 15: note = Any amino acid
  VARIANT 16: note = Any amino acid
  VARIANT 17: note = Any amino acid
  VARIANT 18: note = Any amino acid
  VARIANT 19: note = Any amino acid
  VARIANT 20: note = Any amino acid
  VARIANT 21: note = Any amino acid
  VARIANT 22: note = Any amino acid
  VARIANT 23: note = Any amino acid
  VARIANT 24: note = Any amino acid
  VARIANT 25: note = Any amino acid
  VARIANT 26: note = Any amino acid
  VARIANT 27: note = Any amino acid
  VARIANT 28: note = Any amino acid
  VARIANT 29: note = Any amino acid
  VARIANT 30: note = Any amino acid
  VARIANT 31: note = Any amino acid
  VARIANT 33: note = Any amino acid
  VARIANT 34: note = Any amino acid
  VARIANT 35: note = Any amino acid
  VARIANT 36: note = Any amino acid
  VARIANT 37: note = Any amino acid
  VARIANT 38: note = Any amino acid
  VARIANT 39: note = Any amino acid
  VARIANT 42: note = Any amino acid
  VARIANT 43: note = Any amino acid
  VARIANT 44: note = Any amino acid
  VARIANT 45: note = Any amino acid
  VARIANT 46: note = Any amino acid
  VARIANT 47: note = Any amino acid
  VARIANT 48: note = Any amino acid
  VARIANT 49: note = Any amino acid
  VARIANT 50: note = Any amino acid
  VARIANT 51: note = Any amino acid
  VARIANT 52: note = Any amino acid
  VARIANT 53: note = Any amino acid
GXXXXXXXXXXXXXXXXXXXXXXXXXXXXXXGXXXXXXXSGXXXXXXXXXXXXA

SEQ ID NO: 797139 - protein, 53 aa, unidentified
  VARIANT 2: note = Any amino acid
  VARIANT 3: note = Any amino acid
  VARIANT 4: note = Any amino acid
  VARIANT 5: note = Any amino acid
  VARIANT 6: note = Any amino acid
  VARIANT 7: note = Any amino acid
  VARIANT 8: note = Any amino acid
  VARIANT 9: note = Any amino acid
  VARIANT 10: note = Any amino acid
  VARIANT 11: note = Any amino acid
  VARIANT 12: note = Any amino acid
  VARIANT 13: note = Any amino acid
  VARIANT 14: note = Any amino acid
  VARIANT 15: note = Any amino acid
  VARIANT 16: note = Any amino acid
  VARIANT 17: note = Any amino acid
  VARIANT 18: note = Any amino acid
  VARIANT 19: note = Any amino acid
  VARIANT 20: note = Any amino acid
  VARIANT 21: note = Any amino acid
  VARIANT 22: note = Any amino acid
  VARIANT 23: note = Any amino acid
  VARIANT 24: note = Any amino acid
  VARIANT 25: note = Any amino acid
  VARIANT 26: note = Any amino acid
  VARIANT 27: note = Any amino acid
  VARIANT 28: note = Any amino acid
  VARIANT 29: note = Any amino acid
  VARIANT 30: note = Any amino acid
  VARIANT 32: note = Any amino acid
  VARIANT 33: note = Any amino acid
  VARIANT 34: note = Any amino acid
  VARIANT 35: note = Any amino acid
  VARIANT 36: note = Any amino acid
  VARIANT 37: note = Any amino acid
  VARIANT 38: note = Any amino acid
  VARIANT 41: note = Any amino acid
  VARIANT 42: note = Any amino acid
  VARIANT 43: note = Any amino acid
  VARIANT 44: note = Any amino acid
  VARIANT 45: note = Any amino acid
  VARIANT 46: note = Any amino acid
  VARIANT 47: note = Any amino acid
  VARIANT 48: note = Any amino acid
  VARIANT 49: note = Any amino acid
  VARIANT 50: note = Any amino acid
  VARIANT 51: note = Any amino acid
  VARIANT 52: note = Any amino acid
GXXXXXXXXXXXXXXXXXXXXXXXXXXXXXGXXXXXXXSGXXXXXXXXXXXXR

SEQ ID NO: 797140 - protein, 52 aa, unidentified
  VARIANT 2: note = Any amino acid
  VARIANT 3: note = Any amino acid
  VARIANT 4: note = Any amino acid
  VARIANT 5: note = Any amino acid
  VARIANT 6: note = Any amino acid
  VARIANT 7: note = Any amino acid
  VARIANT 8: note = Any amino acid
  VARIANT 9: note = Any amino acid
  VARIANT 10: note = Any amino acid
  VARIANT 11: note = Any amino acid
  VARIANT 12: note = Any amino acid
  VARIANT 13: note = Any amino acid
  VARIANT 14: note = Any amino acid
  VARIANT 15: note = Any amino acid
  VARIANT 16: note = Any amino acid
  VARIANT 17: note = Any amino acid
  VARIANT 18: note = Any amino acid
  VARIANT 19: note = Any amino acid
  VARIANT 20: note = Any amino acid
  VARIANT 21: note = Any amino acid
  VARIANT 22: note = Any amino acid
  VARIANT 23: note = Any amino acid
  VARIANT 24: note = Any amino acid
  VARIANT 25: note = Any amino acid
  VARIANT 26: note = Any amino acid
  VARIANT 27: note = Any amino acid
  VARIANT 28: note = Any amino acid
  VARIANT 29: note = Any amino acid
  VARIANT 30: note = Any amino acid
  VARIANT 32: note = Any amino acid
  VARIANT 33: note = Any amino acid
  VARIANT 34: note = Any amino acid
  VARIANT 35: note = Any amino acid
  VARIANT 36: note = Any amino acid
  VARIANT 37: note = Any amino acid
  VARIANT 38: note = Any amino acid
  VARIANT 41: note = Any amino acid
  VARIANT 42: note = Any amino acid
  VARIANT 43: note = Any amino acid
  VARIANT 44: note = Any amino acid
  VARIANT 45: note = Any amino acid
  VARIANT 46: note = Any amino acid
  VARIANT 47: note = Any amino acid
  VARIANT 48: note = Any amino acid
  VARIANT 49: note = Any amino acid
  VARIANT 50: note = Any amino acid
  VARIANT 51: note = Any amino acid
GXXXXXXXXXXXXXXXXXXXXXXXXXXXXXGXXXXXXXSGXXXXXXXXXXXC

SEQ ID NO: 797141 - protein, 52 aa, unidentified
  VARIANT 2: note = Any amino acid
  VARIANT 3: note = Any amino acid
  VARIANT 4: note = Any amino acid
  VARIANT 5: note = Any amino acid
  VARIANT 6: note = Any amino acid
  VARIANT 7: note = Any amino acid
  VARIANT 8: note = Any amino acid
  VARIANT 9: note = Any amino acid
  VARIANT 10: note = Any amino acid
  VARIANT 11: note = Any amino acid
  VARIANT 12: note = Any amino acid
  VARIANT 13: note = Any amino acid
  VARIANT 14: note = Any amino acid
  VARIANT 15: note = Any amino acid
  VARIANT 16: note = Any amino acid
  VARIANT 17: note = Any amino acid
  VARIANT 18: note = Any amino acid
  VARIANT 19: note = Any amino acid
  VARIANT 20: note = Any amino acid
  VARIANT 21: note = Any amino acid
  VARIANT 22: note = Any amino acid
  VARIANT 23: note = Any amino acid
  VARIANT 24: note = Any amino acid
  VARIANT 25: note = Any amino acid
  VARIANT 26: note = Any amino acid
  VARIANT 27: note = Any amino acid
  VARIANT 28: note = Any amino acid
  VARIANT 29: note = Any amino acid
  VARIANT 30: note = Any amino acid
  VARIANT 32: note = Any amino acid
  VARIANT 33: note = Any amino acid
  VARIANT 34: note = Any amino acid
  VARIANT 35: note = Any amino acid
  VARIANT 36: note = Any amino acid
  VARIANT 37: note = Any amino acid
  VARIANT 38: note = Any amino acid
  VARIANT 41: note = Any amino acid
  VARIANT 42: note = Any amino acid
  VARIANT 43: note = Any amino acid
  VARIANT 44: note = Any amino acid
  VARIANT 45: note = Any amino acid
  VARIANT 46: note = Any amino acid
  VARIANT 47: note = Any amino acid
  VARIANT 48: note = Any amino acid
  VARIANT 49: note = Any amino acid
  VARIANT 50: note = Any amino acid
  VARIANT 51: note = Any amino acid
GXXXXXXXXXXXXXXXXXXXXXXXXXXXXXGXXXXXXXTGXXXXXXXXXXXG

SEQ ID NO: 797142 - protein, 52 aa, unidentified
  VARIANT 2: note = Any amino acid
  VARIANT 3: note = Any amino acid
  VARIANT 4: note = Any amino acid
  VARIANT 5: note = Any amino acid
  VARIANT 6: note = Any amino acid
  VARIANT 7: note = Any amino acid
  VARIANT 8: note = Any amino acid
  VARIANT 9: note = Any amino acid
  VARIANT 10: note = Any amino acid
  VARIANT 11: note = Any amino acid
  VARIANT 12: note = Any amino acid
  VARIANT 13: note = Any amino acid
  VARIANT 14: note = Any amino acid
  VARIANT 15: note = Any amino acid
  VARIANT 16: note = Any amino acid
  VARIANT 17: note = Any amino acid
  VARIANT 18: note = Any amino acid
  VARIANT 19: note = Any amino acid
  VARIANT 20: note = Any amino acid
  VARIANT 21: note = Any amino acid
  VARIANT 22: note = Any amino acid
  VARIANT 23: note = Any amino acid
  VARIANT 24: note = Any amino acid
  VARIANT 25: note = Any amino acid
  VARIANT 26: note = Any amino acid
  VARIANT 27: note = Any amino acid
  VARIANT 28: note = Any amino acid
  VARIANT 29: note = Any amino acid
  VARIANT 30: note = Any amino acid
  VARIANT 31: note = Any amino acid
  VARIANT 33: note = Any amino acid
  VARIANT 34: note = Any amino acid
  VARIANT 35: note = Any amino acid
  VARIANT 36: note = Any amino acid
  VARIANT 37: note = Any amino acid
  VARIANT 38: note = Any amino acid
  VARIANT 39: note = Any amino acid
  VARIANT 42: note = Any amino acid
  VARIANT 43: note = Any amino acid
  VARIANT 44: note = Any amino acid
  VARIANT 45: note = Any amino acid
  VARIANT 46: note = Any amino acid
  VARIANT 47: note = Any amino acid
  VARIANT 48: note = Any amino acid
  VARIANT 49: note = Any amino acid
  VARIANT 50: note = Any amino acid
  VARIANT 51: note = Any amino acid
GXXXXXXXXXXXXXXXXXXXXXXXXXXXXXXGXXXXXXXSGXXXXXXXXXXR

SEQ ID NO: 797143 - protein, 54 aa, unidentified
  VARIANT 2: note = Any amino acid
  VARIANT 3: note = Any amino acid
  VARIANT 4: note = Any amino acid
  VARIANT 5: note = Any amino acid
  VARIANT 6: note = Any amino acid
  VARIANT 7: note = Any amino acid
  VARIANT 8: note = Any amino acid
  VARIANT 9: note = Any amino acid
  VARIANT 10: note = Any amino acid
  VARIANT 11: note = Any amino acid
  VARIANT 12: note = Any amino acid
  VARIANT 13: note = Any amino acid
  VARIANT 14: note = Any amino acid
  VARIANT 15: note = Any amino acid
  VARIANT 16: note = Any amino acid
  VARIANT 17: note = Any amino acid
  VARIANT 18: note = Any amino acid
  VARIANT 19: note = Any amino acid
  VARIANT 20: note = Any amino acid
  VARIANT 21: note = Any amino acid
  VARIANT 22: note = Any amino acid
  VARIANT 23: note = Any amino acid
  VARIANT 24: note = Any amino acid
  VARIANT 25: note = Any amino acid
  VARIANT 26: note = Any amino acid
  VARIANT 27: note = Any amino acid
  VARIANT 28: note = Any amino acid
  VARIANT 29: note = Any amino acid
  VARIANT 30: note = Any amino acid
  VARIANT 31: note = Any amino acid
  VARIANT 33: note = Any amino acid
  VARIANT 34: note = Any amino acid
  VARIANT 35: note = Any amino acid
  VARIANT 36: note = Any amino acid
  VARIANT 37: note = Any amino acid
  VARIANT 38: note = Any amino acid
  VARIANT 39: note = Any amino acid
  VARIANT 42: note = Any amino acid
  VARIANT 43: note = Any amino acid
  VARIANT 44: note = Any amino acid
  VARIANT 45: note = Any amino acid
  VARIANT 46: note = Any amino acid
  VARIANT 47: note = Any amino acid
  VARIANT 48: note = Any amino acid
  VARIANT 49: note = Any amino acid
  VARIANT 50: note = Any amino acid
  VARIANT 51: note = Any amino acid
  VARIANT 52: note = Any amino acid
  VARIANT 53: note = Any amino acid
GXXXXXXXXXXXXXXXXXXXXXXXXXXXXXXGXXXXXXXSGXXXXXXXXXXXXG

SEQ ID NO: 797144 - protein, 52 aa, unidentified
  VARIANT 2: note = Any amino acid
  VARIANT 3: note = Any amino acid
  VARIANT 4: note = Any amino acid
  VARIANT 5: note = Any amino acid
  VARIANT 6: note = Any amino acid
  VARIANT 7: note = Any amino acid
  VARIANT 8: note = Any amino acid
  VARIANT 9: note = Any amino acid
  VARIANT 10: note = Any amino acid
  VARIANT 11: note = Any amino acid
  VARIANT 12: note = Any amino acid
  VARIANT 13: note = Any amino acid
  VARIANT 14: note = Any amino acid
  VARIANT 15: note = Any amino acid
  VARIANT 16: note = Any amino acid
  VARIANT 17: note = Any amino acid
  VARIANT 18: note = Any amino acid
  VARIANT 19: note = Any amino acid
  VARIANT 20: note = Any amino acid
  VARIANT 21: note = Any amino acid
  VARIANT 22: note = Any amino acid
  VARIANT 23: note = Any amino acid
  VARIANT 24: note = Any amino acid
  VARIANT 25: note = Any amino acid
  VARIANT 26: note = Any amino acid
  VARIANT 27: note = Any amino acid
  VARIANT 28: note = Any amino acid
  VARIANT 29: note = Any amino acid
  VARIANT 30: note = Any amino acid
  VARIANT 31: note = Any amino acid
  VARIANT 33: note = Any amino acid
  VARIANT 34: note = Any amino acid
  VARIANT 35: note = Any amino acid
  VARIANT 36: note = Any amino acid
  VARIANT 37: note = Any amino acid
  VARIANT 38: note = Any amino acid
  VARIANT 39: note = Any amino acid
  VARIANT 42: note = Any amino acid
  VARIANT 43: note = Any amino acid
  VARIANT 44: note = Any amino acid
  VARIANT 45: note = Any amino acid
  VARIANT 46: note = Any amino acid
  VARIANT 47: note = Any amino acid
  VARIANT 48: note = Any amino acid
  VARIANT 49: note = Any amino acid
  VARIANT 50: note = Any amino acid
  VARIANT 51: note = Any amino acid
GXXXXXXXXXXXXXXXXXXXXXXXXXXXXXXGXXXXXXXSNXXXXXXXXXXG

SEQ ID NO: 797145 - protein, 53 aa, unidentified
  VARIANT 2: note = Any amino acid
  VARIANT 3: note = Any amino acid
  VARIANT 4: note = Any amino acid
  VARIANT 5: note = Any amino acid
  VARIANT 6: note = Any amino acid
  VARIANT 7: note = Any amino acid
  VARIANT 8: note = Any amino acid
  VARIANT 9: note = Any amino acid
  VARIANT 10: note = Any amino acid
  VARIANT 11: note = Any amino acid
  VARIANT 12: note = Any amino acid
  VARIANT 13: note = Any amino acid
  VARIANT 14: note = Any amino acid
  VARIANT 15: note = Any amino acid
  VARIANT 16: note = Any amino acid
  VARIANT 17: note = Any amino acid
  VARIANT 18: note = Any amino acid
  VARIANT 19: note = Any amino acid
  VARIANT 20: note = Any amino acid
  VARIANT 21: note = Any amino acid
  VARIANT 22: note = Any amino acid
  VARIANT 23: note = Any amino acid
  VARIANT 24: note = Any amino acid
  VARIANT 25: note = Any amino acid
  VARIANT 26: note = Any amino acid
  VARIANT 27: note = Any amino acid
  VARIANT 28: note = Any amino acid
  VARIANT 29: note = Any amino acid
  VARIANT 30: note = Any amino acid
  VARIANT 31: note = Any amino acid
  VARIANT 33: note = Any amino acid
  VARIANT 34: note = Any amino acid
  VARIANT 35: note = Any amino acid
  VARIANT 36: note = Any amino acid
  VARIANT 37: note = Any amino acid
  VARIANT 38: note = Any amino acid
  VARIANT 39: note = Any amino acid
  VARIANT 42: note = Any amino acid
  VARIANT 43: note = Any amino acid
  VARIANT 44: note = Any amino acid
  VARIANT 45: note = Any amino acid
  VARIANT 46: note = Any amino acid
  VARIANT 47: note = Any amino acid
  VARIANT 48: note = Any amino acid
  VARIANT 49: note = Any amino acid
  VARIANT 50: note = Any amino acid
  VARIANT 51: note = Any amino acid
  VARIANT 52: note = Any amino acid
GXXXXXXXXXXXXXXXXXXXXXXXXXXXXXXGXXXXXXXSGXXXXXXXXXXXC

SEQ ID NO: 797146 - protein, 55 aa, unidentified
  VARIANT 2: note = Any amino acid
  VARIANT 3: note = Any amino acid
  VARIANT 4: note = Any amino acid
  VARIANT 5: note = Any amino acid
  VARIANT 6: note = Any amino acid
  VARIANT 7: note = Any amino acid
  VARIANT 8: note = Any amino acid
  VARIANT 9: note = Any amino acid
  VARIANT 10: note = Any amino acid
  VARIANT 11: note = Any amino acid
  VARIANT 12: note = Any amino acid
  VARIANT 13: note = Any amino acid
  VARIANT 14: note = Any amino acid
  VARIANT 15: note = Any amino acid
  VARIANT 16: note = Any amino acid
  VARIANT 17: note = Any amino acid
  VARIANT 18: note = Any amino acid
  VARIANT 19: note = Any amino acid
  VARIANT 20: note = Any amino acid
  VARIANT 21: note = Any amino acid
  VARIANT 22: note = Any amino acid
  VARIANT 23: note = Any amino acid
  VARIANT 24: note = Any amino acid
  VARIANT 25: note = Any amino acid
  VARIANT 26: note = Any amino acid
  VARIANT 27: note = Any amino acid
  VARIANT 28: note = Any amino acid
  VARIANT 29: note = Any amino acid
  VARIANT 30: note = Any amino acid
  VARIANT 31: note = Any amino acid
  VARIANT 32: note = Any amino acid
  VARIANT 33: note = Any amino acid
  VARIANT 35: note = Any amino acid
  VARIANT 36: note = Any amino acid
  VARIANT 37: note = Any amino acid
  VARIANT 38: note = Any amino acid
  VARIANT 39: note = Any amino acid
  VARIANT 40: note = Any amino acid
  VARIANT 41: note = Any amino acid
  VARIANT 44: note = Any amino acid
  VARIANT 45: note = Any amino acid
  VARIANT 46: note = Any amino acid
  VARIANT 47: note = Any amino acid
  VARIANT 48: note = Any amino acid
  VARIANT 49: note = Any amino acid
  VARIANT 50: note = Any amino acid
  VARIANT 51: note = Any amino acid
  VARIANT 52: note = Any amino acid
  VARIANT 53: note = Any amino acid
  VARIANT 54: note = Any amino acid
GXXXXXXXXXXXXXXXXXXXXXXXXXXXXXXXXGXXXXXXXSGXXXXXXXXXXXG

SEQ ID NO: 797147 - protein, 50 aa, unidentified
  VARIANT 2: note = Any amino acid
  VARIANT 3: note = Any amino acid
  VARIANT 4: note = Any amino acid
  VARIANT 5: note = Any amino acid
  VARIANT 6: note = Any amino acid
  VARIANT 7: note = Any amino acid
  VARIANT 8: note = Any amino acid
  VARIANT 9: note = Any amino acid
  VARIANT 10: note = Any amino acid
  VARIANT 11: note = Any amino acid
  VARIANT 12: note = Any amino acid
  VARIANT 13: note = Any amino acid
  VARIANT 14: note = Any amino acid
  VARIANT 15: note = Any amino acid
  VARIANT 16: note = Any amino acid
  VARIANT 17: note = Any amino acid
  VARIANT 18: note = Any amino acid
  VARIANT 19: note = Any amino acid
  VARIANT 20: note = Any amino acid
  VARIANT 21: note = Any amino acid
  VARIANT 22: note = Any amino acid
  VARIANT 23: note = Any amino acid
  VARIANT 24: note = Any amino acid
  VARIANT 25: note = Any amino acid
  VARIANT 26: note = Any amino acid
  VARIANT 27: note = Any amino acid
  VARIANT 28: note = Any amino acid
  VARIANT 29: note = Any amino acid
  VARIANT 31: note = Any amino acid
  VARIANT 32: note = Any amino acid
  VARIANT 33: note = Any amino acid
  VARIANT 34: note = Any amino acid
  VARIANT 35: note = Any amino acid
  VARIANT 36: note = Any amino acid
  VARIANT 37: note = Any amino acid
  VARIANT 40: note = Any amino acid
  VARIANT 41: note = Any amino acid
  VARIANT 42: note = Any amino acid
  VARIANT 43: note = Any amino acid
  VARIANT 44: note = Any amino acid
  VARIANT 45: note = Any amino acid
  VARIANT 46: note = Any amino acid
  VARIANT 47: note = Any amino acid
  VARIANT 48: note = Any amino acid
  VARIANT 49: note = Any amino acid
GXXXXXXXXXXXXXXXXXXXXXXXXXXXXGXXXXXXXSAXXXXXXXXXXG

SEQ ID NO: 797148 - protein, 53 aa, unidentified
  VARIANT 2: note = Any amino acid
  VARIANT 3: note = Any amino acid
  VARIANT 4: note = Any amino acid
  VARIANT 5: note = Any amino acid
  VARIANT 6: note = Any amino acid
  VARIANT 7: note = Any amino acid
  VARIANT 8: note = Any amino acid
  VARIANT 9: note = Any amino acid
  VARIANT 10: note = Any amino acid
  VARIANT 11: note = Any amino acid
  VARIANT 12: note = Any amino acid
  VARIANT 13: note = Any amino acid
  VARIANT 14: note = Any amino acid
  VARIANT 15: note = Any amino acid
  VARIANT 16: note = Any amino acid
  VARIANT 17: note = Any amino acid
  VARIANT 18: note = Any amino acid
  VARIANT 19: note = Any amino acid
  VARIANT 20: note = Any amino acid
  VARIANT 21: note = Any amino acid
  VARIANT 22: note = Any amino acid
  VARIANT 23: note = Any amino acid
  VARIANT 24: note = Any amino acid
  VARIANT 25: note = Any amino acid
  VARIANT 26: note = Any amino acid
  VARIANT 27: note = Any amino acid
  VARIANT 28: note = Any amino acid
  VARIANT 29: note = Any amino acid
  VARIANT 30: note = Any amino acid
  VARIANT 32: note = Any amino acid
  VARIANT 33: note = Any amino acid
  VARIANT 34: note = Any amino acid
  VARIANT 35: note = Any amino acid
  VARIANT 36: note = Any amino acid
  VARIANT 37: note = Any amino acid
  VARIANT 38: note = Any amino acid
  VARIANT 41: note = Any amino acid
  VARIANT 42: note = Any amino acid
  VARIANT 43: note = Any amino acid
  VARIANT 44: note = Any amino acid
  VARIANT 45: note = Any amino acid
  VARIANT 46: note = Any amino acid
  VARIANT 47: note = Any amino acid
  VARIANT 48: note = Any amino acid
  VARIANT 49: note = Any amino acid
  VARIANT 50: note = Any amino acid
  VARIANT 51: note = Any amino acid
  VARIANT 52: note = Any amino acid
GXXXXXXXXXXXXXXXXXXXXXXXXXXXXXGXXXXXXXSGXXXXXXXXXXXXC

SEQ ID NO: 797149 - protein, 52 aa, unidentified
  VARIANT 2: note = Any amino acid
  VARIANT 3: note = Any amino acid
  VARIANT 4: note = Any amino acid
  VARIANT 5: note = Any amino acid
  VARIANT 6: note = Any amino acid
  VARIANT 7: note = Any amino acid
  VARIANT 8: note = Any amino acid
  VARIANT 9: note = Any amino acid
  VARIANT 10: note = Any amino acid
  VARIANT 11: note = Any amino acid
  VARIANT 12: note = Any amino acid
  VARIANT 13: note = Any amino acid
  VARIANT 14: note = Any amino acid
  VARIANT 15: note = Any amino acid
  VARIANT 16: note = Any amino acid
  VARIANT 17: note = Any amino acid
  VARIANT 18: note = Any amino acid
  VARIANT 19: note = Any amino acid
  VARIANT 20: note = Any amino acid
  VARIANT 21: note = Any amino acid
  VARIANT 22: note = Any amino acid
  VARIANT 23: note = Any amino acid
  VARIANT 24: note = Any amino acid
  VARIANT 25: note = Any amino acid
  VARIANT 26: note = Any amino acid
  VARIANT 27: note = Any amino acid
  VARIANT 28: note = Any amino acid
  VARIANT 29: note = Any amino acid
  VARIANT 30: note = Any amino acid
  VARIANT 31: note = Any amino acid
  VARIANT 33: note = Any amino acid
  VARIANT 34: note = Any amino acid
  VARIANT 35: note = Any amino acid
  VARIANT 36: note = Any amino acid
  VARIANT 37: note = Any amino acid
  VARIANT 38: note = Any amino acid
  VARIANT 39: note = Any amino acid
  VARIANT 42: note = Any amino acid
  VARIANT 43: note = Any amino acid
  VARIANT 44: note = Any amino acid
  VARIANT 45: note = Any amino acid
  VARIANT 46: note = Any amino acid
  VARIANT 47: note = Any amino acid
  VARIANT 48: note = Any amino acid
  VARIANT 49: note = Any amino acid
  VARIANT 50: note = Any amino acid
  VARIANT 51: note = Any amino acid
RXXXXXXXXXXXXXXXXXXXXXXXXXXXXXXGXXXXXXXSGXXXXXXXXXXV

SEQ ID NO: 797150 - protein, 54 aa, unidentified
  VARIANT 2: note = Any amino acid
  VARIANT 3: note = Any amino acid
  VARIANT 4: note = Any amino acid
  VARIANT 5: note = Any amino acid
  VARIANT 6: note = Any amino acid
  VARIANT 7: note = Any amino acid
  VARIANT 8: note = Any amino acid
  VARIANT 9: note = Any amino acid
  VARIANT 10: note = Any amino acid
  VARIANT 11: note = Any amino acid
  VARIANT 12: note = Any amino acid
  VARIANT 13: note = Any amino acid
  VARIANT 14: note = Any amino acid
  VARIANT 15: note = Any amino acid
  VARIANT 16: note = Any amino acid
  VARIANT 17: note = Any amino acid
  VARIANT 18: note = Any amino acid
  VARIANT 19: note = Any amino acid
  VARIANT 20: note = Any amino acid
  VARIANT 21: note = Any amino acid
  VARIANT 22: note = Any amino acid
  VARIANT 23: note = Any amino acid
  VARIANT 24: note = Any amino acid
  VARIANT 25: note = Any amino acid
  VARIANT 26: note = Any amino acid
  VARIANT 27: note = Any amino acid
  VARIANT 28: note = Any amino acid
  VARIANT 29: note = Any amino acid
  VARIANT 30: note = Any amino acid
  VARIANT 31: note = Any amino acid
  VARIANT 32: note = Any amino acid
  VARIANT 34: note = Any amino acid
  VARIANT 35: note = Any amino acid
  VARIANT 36: note = Any amino acid
  VARIANT 37: note = Any amino acid
  VARIANT 38: note = Any amino acid
  VARIANT 39: note = Any amino acid
  VARIANT 40: note = Any amino acid
  VARIANT 43: note = Any amino acid
  VARIANT 44: note = Any amino acid
  VARIANT 45: note = Any amino acid
  VARIANT 46: note = Any amino acid
  VARIANT 47: note = Any amino acid
  VARIANT 48: note = Any amino acid
  VARIANT 49: note = Any amino acid
  VARIANT 50: note = Any amino acid
  VARIANT 51: note = Any amino acid
  VARIANT 52: note = Any amino acid
  VARIANT 53: note = Any amino acid
GXXXXXXXXXXXXXXXXXXXXXXXXXXXXXXXNXXXXXXXSGXXXXXXXXXXXK

SEQ ID NO: 797151 - protein, 54 aa, unidentified
  VARIANT 2: note = Any amino acid
  VARIANT 3: note = Any amino acid
  VARIANT 4: note = Any amino acid
  VARIANT 5: note = Any amino acid
  VARIANT 6: note = Any amino acid
  VARIANT 7: note = Any amino acid
  VARIANT 8: note = Any amino acid
  VARIANT 9: note = Any amino acid
  VARIANT 10: note = Any amino acid
  VARIANT 11: note = Any amino acid
  VARIANT 12: note = Any amino acid
  VARIANT 13: note = Any amino acid
  VARIANT 14: note = Any amino acid
  VARIANT 15: note = Any amino acid
  VARIANT 16: note = Any amino acid
  VARIANT 17: note = Any amino acid
  VARIANT 18: note = Any amino acid
  VARIANT 19: note = Any amino acid
  VARIANT 20: note = Any amino acid
  VARIANT 21: note = Any amino acid
  VARIANT 22: note = Any amino acid
  VARIANT 23: note = Any amino acid
  VARIANT 24: note = Any amino acid
  VARIANT 25: note = Any amino acid
  VARIANT 26: note = Any amino acid
  VARIANT 27: note = Any amino acid
  VARIANT 28: note = Any amino acid
  VARIANT 29: note = Any amino acid
  VARIANT 30: note = Any amino acid
  VARIANT 31: note = Any amino acid
  VARIANT 33: note = Any amino acid
  VARIANT 34: note = Any amino acid
  VARIANT 35: note = Any amino acid
  VARIANT 36: note = Any amino acid
  VARIANT 37: note = Any amino acid
  VARIANT 38: note = Any amino acid
  VARIANT 39: note = Any amino acid
  VARIANT 42: note = Any amino acid
  VARIANT 43: note = Any amino acid
  VARIANT 44: note = Any amino acid
  VARIANT 45: note = Any amino acid
  VARIANT 46: note = Any amino acid
  VARIANT 47: note = Any amino acid
  VARIANT 48: note = Any amino acid
  VARIANT 49: note = Any amino acid
  VARIANT 50: note = Any amino acid
  VARIANT 51: note = Any amino acid
  VARIANT 52: note = Any amino acid
  VARIANT 53: note = Any amino acid
GXXXXXXXXXXXXXXXXXXXXXXXXXXXXXXGXXXXXXXSAXXXXXXXXXXXXG

SEQ ID NO: 797152 - protein, 53 aa, unidentified
  VARIANT 2: note = Any amino acid
  VARIANT 3: note = Any amino acid
  VARIANT 4: note = Any amino acid
  VARIANT 5: note = Any amino acid
  VARIANT 6: note = Any amino acid
  VARIANT 7: note = Any amino acid
  VARIANT 8: note = Any amino acid
  VARIANT 9: note = Any amino acid
  VARIANT 10: note = Any amino acid
  VARIANT 11: note = Any amino acid
  VARIANT 12: note = Any amino acid
  VARIANT 13: note = Any amino acid
  VARIANT 14: note = Any amino acid
  VARIANT 15: note = Any amino acid
  VARIANT 16: note = Any amino acid
  VARIANT 17: note = Any amino acid
  VARIANT 18: note = Any amino acid
  VARIANT 19: note = Any amino acid
  VARIANT 20: note = Any amino acid
  VARIANT 21: note = Any amino acid
  VARIANT 22: note = Any amino acid
  VARIANT 23: note = Any amino acid
  VARIANT 24: note = Any amino acid
  VARIANT 25: note = Any amino acid
  VARIANT 26: note = Any amino acid
  VARIANT 27: note = Any amino acid
  VARIANT 28: note = Any amino acid
  VARIANT 29: note = Any amino acid
  VARIANT 30: note = Any amino acid
  VARIANT 31: note = Any amino acid
  VARIANT 33: note = Any amino acid
  VARIANT 34: note = Any amino acid
  VARIANT 35: note = Any amino acid
  VARIANT 36: note = Any amino acid
  VARIANT 37: note = Any amino acid
  VARIANT 38: note = Any amino acid
  VARIANT 39: note = Any amino acid
  VARIANT 42: note = Any amino acid
  VARIANT 43: note = Any amino acid
  VARIANT 44: note = Any amino acid
  VARIANT 45: note = Any amino acid
  VARIANT 46: note = Any amino acid
  VARIANT 47: note = Any amino acid
  VARIANT 48: note = Any amino acid
  VARIANT 49: note = Any amino acid
  VARIANT 50: note = Any amino acid
  VARIANT 51: note = Any amino acid
  VARIANT 52: note = Any amino acid
GXXXXXXXXXXXXXXXXXXXXXXXXXXXXXXNXXXXXXXTGXXXXXXXXXXXK

SEQ ID NO: 797153 - protein, 50 aa, unidentified
  VARIANT 2: note = Any amino acid
  VARIANT 3: note = Any amino acid
  VARIANT 4: note = Any amino acid
  VARIANT 5: note = Any amino acid
  VARIANT 6: note = Any amino acid
  VARIANT 7: note = Any amino acid
  VARIANT 8: note = Any amino acid
  VARIANT 9: note = Any amino acid
  VARIANT 10: note = Any amino acid
  VARIANT 11: note = Any amino acid
  VARIANT 12: note = Any amino acid
  VARIANT 13: note = Any amino acid
  VARIANT 14: note = Any amino acid
  VARIANT 15: note = Any amino acid
  VARIANT 16: note = Any amino acid
  VARIANT 17: note = Any amino acid
  VARIANT 18: note = Any amino acid
  VARIANT 19: note = Any amino acid
  VARIANT 20: note = Any amino acid
  VARIANT 21: note = Any amino acid
  VARIANT 22: note = Any amino acid
  VARIANT 23: note = Any amino acid
  VARIANT 24: note = Any amino acid
  VARIANT 25: note = Any amino acid
  VARIANT 26: note = Any amino acid
  VARIANT 27: note = Any amino acid
  VARIANT 28: note = Any amino acid
  VARIANT 29: note = Any amino acid
  VARIANT 31: note = Any amino acid
  VARIANT 32: note = Any amino acid
  VARIANT 33: note = Any amino acid
  VARIANT 34: note = Any amino acid
  VARIANT 35: note = Any amino acid
  VARIANT 36: note = Any amino acid
  VARIANT 37: note = Any amino acid
  VARIANT 40: note = Any amino acid
  VARIANT 41: note = Any amino acid
  VARIANT 42: note = Any amino acid
  VARIANT 43: note = Any amino acid
  VARIANT 44: note = Any amino acid
  VARIANT 45: note = Any amino acid
  VARIANT 46: note = Any amino acid
  VARIANT 47: note = Any amino acid
  VARIANT 48: note = Any amino acid
  VARIANT 49: note = Any amino acid
CXXXXXXXXXXXXXXXXXXXXXXXXXXXXGXXXXXXXSGXXXXXXXXXXG

SEQ ID NO: 797154 - protein, 49 aa, unidentified
  VARIANT 2: note = Any amino acid
  VARIANT 3: note = Any amino acid
  VARIANT 4: note = Any amino acid
  VARIANT 5: note = Any amino acid
  VARIANT 6: note = Any amino acid
  VARIANT 7: note = Any amino acid
  VARIANT 8: note = Any amino acid
  VARIANT 9: note = Any amino acid
  VARIANT 10: note = Any amino acid
  VARIANT 11: note = Any amino acid
  VARIANT 12: note = Any amino acid
  VARIANT 13: note = Any amino acid
  VARIANT 14: note = Any amino acid
  VARIANT 15: note = Any amino acid
  VARIANT 16: note = Any amino acid
  VARIANT 17: note = Any amino acid
  VARIANT 18: note = Any amino acid
  VARIANT 19: note = Any amino acid
  VARIANT 20: note = Any amino acid
  VARIANT 21: note = Any amino acid
  VARIANT 22: note = Any amino acid
  VARIANT 23: note = Any amino acid
  VARIANT 24: note = Any amino acid
  VARIANT 25: note = Any amino acid
  VARIANT 26: note = Any amino acid
  VARIANT 27: note = Any amino acid
  VARIANT 28: note = Any amino acid
  VARIANT 30: note = Any amino acid
  VARIANT 31: note = Any amino acid
  VARIANT 32: note = Any amino acid
  VARIANT 33: note = Any amino acid
  VARIANT 34: note = Any amino acid
  VARIANT 35: note = Any amino acid
  VARIANT 36: note = Any amino acid
  VARIANT 39: note = Any amino acid
  VARIANT 40: note = Any amino acid
  VARIANT 41: note = Any amino acid
  VARIANT 42: note = Any amino acid
  VARIANT 43: note = Any amino acid
  VARIANT 44: note = Any amino acid
  VARIANT 45: note = Any amino acid
  VARIANT 46: note = Any amino acid
  VARIANT 47: note = Any amino acid
  VARIANT 48: note = Any amino acid
GXXXXXXXXXXXXXXXXXXXXXXXXXXXGXXXXXXXSGXXXXXXXXXXG

SEQ ID NO: 797155 - protein, 53 aa, unidentified
  VARIANT 2: note = Any amino acid
  VARIANT 3: note = Any amino acid
  VARIANT 4: note = Any amino acid
  VARIANT 5: note = Any amino acid
  VARIANT 6: note = Any amino acid
  VARIANT 7: note = Any amino acid
  VARIANT 8: note = Any amino acid
  VARIANT 9: note = Any amino acid
  VARIANT 10: note = Any amino acid
  VARIANT 11: note = Any amino acid
  VARIANT 12: note = Any amino acid
  VARIANT 13: note = Any amino acid
  VARIANT 14: note = Any amino acid
  VARIANT 15: note = Any amino acid
  VARIANT 16: note = Any amino acid
  VARIANT 17: note = Any amino acid
  VARIANT 18: note = Any amino acid
  VARIANT 19: note = Any amino acid
  VARIANT 20: note = Any amino acid
  VARIANT 21: note = Any amino acid
  VARIANT 22: note = Any amino acid
  VARIANT 23: note = Any amino acid
  VARIANT 24: note = Any amino acid
  VARIANT 25: note = Any amino acid
  VARIANT 26: note = Any amino acid
  VARIANT 27: note = Any amino acid
  VARIANT 28: note = Any amino acid
  VARIANT 29: note = Any amino acid
  VARIANT 30: note = Any amino acid
  VARIANT 31: note = Any amino acid
  VARIANT 33: note = Any amino acid
  VARIANT 34: note = Any amino acid
  VARIANT 35: note = Any amino acid
  VARIANT 36: note = Any amino acid
  VARIANT 37: note = Any amino acid
  VARIANT 38: note = Any amino acid
  VARIANT 39: note = Any amino acid
  VARIANT 42: note = Any amino acid
  VARIANT 43: note = Any amino acid
  VARIANT 44: note = Any amino acid
  VARIANT 45: note = Any amino acid
  VARIANT 46: note = Any amino acid
  VARIANT 47: note = Any amino acid
  VARIANT 48: note = Any amino acid
  VARIANT 49: note = Any amino acid
  VARIANT 50: note = Any amino acid
  VARIANT 51: note = Any amino acid
  VARIANT 52: note = Any amino acid
GXXXXXXXXXXXXXXXXXXXXXXXXXXXXXXGXXXXXXXTGXXXXXXXXXXXA

SEQ ID NO: 797156 - protein, 50 aa, unidentified
  VARIANT 2: note = Any amino acid
  VARIANT 3: note = Any amino acid
  VARIANT 4: note = Any amino acid
  VARIANT 5: note = Any amino acid
  VARIANT 6: note = Any amino acid
  VARIANT 7: note = Any amino acid
  VARIANT 8: note = Any amino acid
  VARIANT 9: note = Any amino acid
  VARIANT 10: note = Any amino acid
  VARIANT 11: note = Any amino acid
  VARIANT 12: note = Any amino acid
  VARIANT 13: note = Any amino acid
  VARIANT 14: note = Any amino acid
  VARIANT 15: note = Any amino acid
  VARIANT 16: note = Any amino acid
  VARIANT 17: note = Any amino acid
  VARIANT 18: note = Any amino acid
  VARIANT 19: note = Any amino acid
  VARIANT 20: note = Any amino acid
  VARIANT 21: note = Any amino acid
  VARIANT 22: note = Any amino acid
  VARIANT 23: note = Any amino acid
  VARIANT 24: note = Any amino acid
  VARIANT 25: note = Any amino acid
  VARIANT 26: note = Any amino acid
  VARIANT 27: note = Any amino acid
  VARIANT 28: note = Any amino acid
  VARIANT 30: note = Any amino acid
  VARIANT 31: note = Any amino acid
  VARIANT 32: note = Any amino acid
  VARIANT 33: note = Any amino acid
  VARIANT 34: note = Any amino acid
  VARIANT 35: note = Any amino acid
  VARIANT 36: note = Any amino acid
  VARIANT 39: note = Any amino acid
  VARIANT 40: note = Any amino acid
  VARIANT 41: note = Any amino acid
  VARIANT 42: note = Any amino acid
  VARIANT 43: note = Any amino acid
  VARIANT 44: note = Any amino acid
  VARIANT 45: note = Any amino acid
  VARIANT 46: note = Any amino acid
  VARIANT 47: note = Any amino acid
  VARIANT 48: note = Any amino acid
  VARIANT 49: note = Any amino acid
GXXXXXXXXXXXXXXXXXXXXXXXXXXXGXXXXXXXSGXXXXXXXXXXXG

SEQ ID NO: 797157 - protein, 51 aa, unidentified
  VARIANT 2: note = Any amino acid
  VARIANT 3: note = Any amino acid
  VARIANT 4: note = Any amino acid
  VARIANT 5: note = Any amino acid
  VARIANT 6: note = Any amino acid
  VARIANT 7: note = Any amino acid
  VARIANT 8: note = Any amino acid
  VARIANT 9: note = Any amino acid
  VARIANT 10: note = Any amino acid
  VARIANT 11: note = Any amino acid
  VARIANT 12: note = Any amino acid
  VARIANT 13: note = Any amino acid
  VARIANT 14: note = Any amino acid
  VARIANT 15: note = Any amino acid
  VARIANT 16: note = Any amino acid
  VARIANT 17: note = Any amino acid
  VARIANT 18: note = Any amino acid
  VARIANT 19: note = Any amino acid
  VARIANT 20: note = Any amino acid
  VARIANT 21: note = Any amino acid
  VARIANT 22: note = Any amino acid
  VARIANT 23: note = Any amino acid
  VARIANT 24: note = Any amino acid
  VARIANT 25: note = Any amino acid
  VARIANT 26: note = Any amino acid
  VARIANT 27: note = Any amino acid
  VARIANT 28: note = Any amino acid
  VARIANT 30: note = Any amino acid
  VARIANT 31: note = Any amino acid
  VARIANT 32: note = Any amino acid
  VARIANT 33: note = Any amino acid
  VARIANT 34: note = Any amino acid
  VARIANT 35: note = Any amino acid
  VARIANT 36: note = Any amino acid
  VARIANT 39: note = Any amino acid
  VARIANT 40: note = Any amino acid
  VARIANT 41: note = Any amino acid
  VARIANT 42: note = Any amino acid
  VARIANT 43: note = Any amino acid
  VARIANT 44: note = Any amino acid
  VARIANT 45: note = Any amino acid
  VARIANT 46: note = Any amino acid
  VARIANT 47: note = Any amino acid
  VARIANT 48: note = Any amino acid
  VARIANT 49: note = Any amino acid
  VARIANT 50: note = Any amino acid
GXXXXXXXXXXXXXXXXXXXXXXXXXXXGXXXXXXXSGXXXXXXXXXXXXG

SEQ ID NO: 797158 - protein, 52 aa, unidentified
  VARIANT 2: note = Any amino acid
  VARIANT 3: note = Any amino acid
  VARIANT 4: note = Any amino acid
  VARIANT 5: note = Any amino acid
  VARIANT 6: note = Any amino acid
  VARIANT 7: note = Any amino acid
  VARIANT 8: note = Any amino acid
  VARIANT 9: note = Any amino acid
  VARIANT 10: note = Any amino acid
  VARIANT 11: note = Any amino acid
  VARIANT 12: note = Any amino acid
  VARIANT 13: note = Any amino acid
  VARIANT 14: note = Any amino acid
  VARIANT 15: note = Any amino acid
  VARIANT 16: note = Any amino acid
  VARIANT 17: note = Any amino acid
  VARIANT 18: note = Any amino acid
  VARIANT 19: note = Any amino acid
  VARIANT 20: note = Any amino acid
  VARIANT 21: note = Any amino acid
  VARIANT 22: note = Any amino acid
  VARIANT 23: note = Any amino acid
  VARIANT 24: note = Any amino acid
  VARIANT 25: note = Any amino acid
  VARIANT 26: note = Any amino acid
  VARIANT 27: note = Any amino acid
  VARIANT 28: note = Any amino acid
  VARIANT 29: note = Any amino acid
  VARIANT 30: note = Any amino acid
  VARIANT 31: note = Any amino acid
  VARIANT 33: note = Any amino acid
  VARIANT 34: note = Any amino acid
  VARIANT 35: note = Any amino acid
  VARIANT 36: note = Any amino acid
  VARIANT 37: note = Any amino acid
  VARIANT 38: note = Any amino acid
  VARIANT 39: note = Any amino acid
  VARIANT 42: note = Any amino acid
  VARIANT 43: note = Any amino acid
  VARIANT 44: note = Any amino acid
  VARIANT 45: note = Any amino acid
  VARIANT 46: note = Any amino acid
  VARIANT 47: note = Any amino acid
  VARIANT 48: note = Any amino acid
  VARIANT 49: note = Any amino acid
  VARIANT 50: note = Any amino acid
  VARIANT 51: note = Any amino acid
AXXXXXXXXXXXXXXXXXXXXXXXXXXXXXXGXXXXXXXSGXXXXXXXXXXG

SEQ ID NO: 797159 - protein, 50 aa, unidentified
  VARIANT 2: note = Any amino acid
  VARIANT 3: note = Any amino acid
  VARIANT 4: note = Any amino acid
  VARIANT 5: note = Any amino acid
  VARIANT 6: note = Any amino acid
  VARIANT 7: note = Any amino acid
  VARIANT 8: note = Any amino acid
  VARIANT 9: note = Any amino acid
  VARIANT 10: note = Any amino acid
  VARIANT 11: note = Any amino acid
  VARIANT 12: note = Any amino acid
  VARIANT 13: note = Any amino acid
  VARIANT 14: note = Any amino acid
  VARIANT 15: note = Any amino acid
  VARIANT 16: note = Any amino acid
  VARIANT 17: note = Any amino acid
  VARIANT 18: note = Any amino acid
  VARIANT 19: note = Any amino acid
  VARIANT 20: note = Any amino acid
  VARIANT 21: note = Any amino acid
  VARIANT 22: note = Any amino acid
  VARIANT 23: note = Any amino acid
  VARIANT 24: note = Any amino acid
  VARIANT 25: note = Any amino acid
  VARIANT 26: note = Any amino acid
  VARIANT 27: note = Any amino acid
  VARIANT 28: note = Any amino acid
  VARIANT 29: note = Any amino acid
  VARIANT 31: note = Any amino acid
  VARIANT 32: note = Any amino acid
  VARIANT 33: note = Any amino acid
  VARIANT 34: note = Any amino acid
  VARIANT 35: note = Any amino acid
  VARIANT 36: note = Any amino acid
  VARIANT 37: note = Any amino acid
  VARIANT 40: note = Any amino acid
  VARIANT 41: note = Any amino acid
  VARIANT 42: note = Any amino acid
  VARIANT 43: note = Any amino acid
  VARIANT 44: note = Any amino acid
  VARIANT 45: note = Any amino acid
  VARIANT 46: note = Any amino acid
  VARIANT 47: note = Any amino acid
  VARIANT 48: note = Any amino acid
  VARIANT 49: note = Any amino acid
GXXXXXXXXXXXXXXXXXXXXXXXXXXXXGXXXXXXXRGXXXXXXXXXXG

SEQ ID NO: 797160 - protein, 52 aa, unidentified
  VARIANT 2: note = Any amino acid
  VARIANT 3: note = Any amino acid
  VARIANT 4: note = Any amino acid
  VARIANT 5: note = Any amino acid
  VARIANT 6: note = Any amino acid
  VARIANT 7: note = Any amino acid
  VARIANT 8: note = Any amino acid
  VARIANT 9: note = Any amino acid
  VARIANT 10: note = Any amino acid
  VARIANT 11: note = Any amino acid
  VARIANT 12: note = Any amino acid
  VARIANT 13: note = Any amino acid
  VARIANT 14: note = Any amino acid
  VARIANT 15: note = Any amino acid
  VARIANT 16: note = Any amino acid
  VARIANT 17: note = Any amino acid
  VARIANT 18: note = Any amino acid
  VARIANT 19: note = Any amino acid
  VARIANT 20: note = Any amino acid
  VARIANT 21: note = Any amino acid
  VARIANT 22: note = Any amino acid
  VARIANT 23: note = Any amino acid
  VARIANT 24: note = Any amino acid
  VARIANT 25: note = Any amino acid
  VARIANT 26: note = Any amino acid
  VARIANT 27: note = Any amino acid
  VARIANT 28: note = Any amino acid
  VARIANT 29: note = Any amino acid
  VARIANT 30: note = Any amino acid
  VARIANT 31: note = Any amino acid
  VARIANT 33: note = Any amino acid
  VARIANT 34: note = Any amino acid
  VARIANT 35: note = Any amino acid
  VARIANT 36: note = Any amino acid
  VARIANT 37: note = Any amino acid
  VARIANT 38: note = Any amino acid
  VARIANT 39: note = Any amino acid
  VARIANT 42: note = Any amino acid
  VARIANT 43: note = Any amino acid
  VARIANT 44: note = Any amino acid
  VARIANT 45: note = Any amino acid
  VARIANT 46: note = Any amino acid
  VARIANT 47: note = Any amino acid
  VARIANT 48: note = Any amino acid
  VARIANT 49: note = Any amino acid
  VARIANT 50: note = Any amino acid
  VARIANT 51: note = Any amino acid
GXXXXXXXXXXXXXXXXXXXXXXXXXXXXXXCXXXXXXXSGXXXXXXXXXXS

SEQ ID NO: 797161 - protein, 53 aa, unidentified
  VARIANT 2: note = Any amino acid
  VARIANT 3: note = Any amino acid
  VARIANT 4: note = Any amino acid
  VARIANT 5: note = Any amino acid
  VARIANT 6: note = Any amino acid
  VARIANT 7: note = Any amino acid
  VARIANT 8: note = Any amino acid
  VARIANT 9: note = Any amino acid
  VARIANT 10: note = Any amino acid
  VARIANT 11: note = Any amino acid
  VARIANT 12: note = Any amino acid
  VARIANT 13: note = Any amino acid
  VARIANT 14: note = Any amino acid
  VARIANT 15: note = Any amino acid
  VARIANT 16: note = Any amino acid
  VARIANT 17: note = Any amino acid
  VARIANT 18: note = Any amino acid
  VARIANT 19: note = Any amino acid
  VARIANT 20: note = Any amino acid
  VARIANT 21: note = Any amino acid
  VARIANT 22: note = Any amino acid
  VARIANT 23: note = Any amino acid
  VARIANT 24: note = Any amino acid
  VARIANT 25: note = Any amino acid
  VARIANT 26: note = Any amino acid
  VARIANT 27: note = Any amino acid
  VARIANT 28: note = Any amino acid
  VARIANT 29: note = Any amino acid
  VARIANT 30: note = Any amino acid
  VARIANT 31: note = Any amino acid
  VARIANT 33: note = Any amino acid
  VARIANT 34: note = Any amino acid
  VARIANT 35: note = Any amino acid
  VARIANT 36: note = Any amino acid
  VARIANT 37: note = Any amino acid
  VARIANT 38: note = Any amino acid
  VARIANT 39: note = Any amino acid
  VARIANT 42: note = Any amino acid
  VARIANT 43: note = Any amino acid
  VARIANT 44: note = Any amino acid
  VARIANT 45: note = Any amino acid
  VARIANT 46: note = Any amino acid
  VARIANT 47: note = Any amino acid
  VARIANT 48: note = Any amino acid
  VARIANT 49: note = Any amino acid
  VARIANT 50: note = Any amino acid
  VARIANT 51: note = Any amino acid
  VARIANT 52: note = Any amino acid
GXXXXXXXXXXXXXXXXXXXXXXXXXXXXXXGXXXXXXXSGXXXXXXXXXXXK

SEQ ID NO: 797162 - protein, 52 aa, unidentified
  VARIANT 2: note = Any amino acid
  VARIANT 3: note = Any amino acid
  VARIANT 4: note = Any amino acid
  VARIANT 5: note = Any amino acid
  VARIANT 6: note = Any amino acid
  VARIANT 7: note = Any amino acid
  VARIANT 8: note = Any amino acid
  VARIANT 9: note = Any amino acid
  VARIANT 10: note = Any amino acid
  VARIANT 11: note = Any amino acid
  VARIANT 12: note = Any amino acid
  VARIANT 13: note = Any amino acid
  VARIANT 14: note = Any amino acid
  VARIANT 15: note = Any amino acid
  VARIANT 16: note = Any amino acid
  VARIANT 17: note = Any amino acid
  VARIANT 18: note = Any amino acid
  VARIANT 19: note = Any amino acid
  VARIANT 20: note = Any amino acid
  VARIANT 21: note = Any amino acid
  VARIANT 22: note = Any amino acid
  VARIANT 23: note = Any amino acid
  VARIANT 24: note = Any amino acid
  VARIANT 25: note = Any amino acid
  VARIANT 26: note = Any amino acid
  VARIANT 27: note = Any amino acid
  VARIANT 28: note = Any amino acid
  VARIANT 29: note = Any amino acid
  VARIANT 30: note = Any amino acid
  VARIANT 31: note = Any amino acid
  VARIANT 33: note = Any amino acid
  VARIANT 34: note = Any amino acid
  VARIANT 35: note = Any amino acid
  VARIANT 36: note = Any amino acid
  VARIANT 37: note = Any amino acid
  VARIANT 38: note = Any amino acid
  VARIANT 39: note = Any amino acid
  VARIANT 42: note = Any amino acid
  VARIANT 43: note = Any amino acid
  VARIANT 44: note = Any amino acid
  VARIANT 45: note = Any amino acid
  VARIANT 46: note = Any amino acid
  VARIANT 47: note = Any amino acid
  VARIANT 48: note = Any amino acid
  VARIANT 49: note = Any amino acid
  VARIANT 50: note = Any amino acid
  VARIANT 51: note = Any amino acid
GXXXXXXXXXXXXXXXXXXXXXXXXXXXXXXTXXXXXXXSGXXXXXXXXXXS

SEQ ID NO: 797163 - protein, 52 aa, unidentified
  VARIANT 2: note = Any amino acid
  VARIANT 3: note = Any amino acid
  VARIANT 4: note = Any amino acid
  VARIANT 5: note = Any amino acid
  VARIANT 6: note = Any amino acid
  VARIANT 7: note = Any amino acid
  VARIANT 8: note = Any amino acid
  VARIANT 9: note = Any amino acid
  VARIANT 10: note = Any amino acid
  VARIANT 11: note = Any amino acid
  VARIANT 12: note = Any amino acid
  VARIANT 13: note = Any amino acid
  VARIANT 14: note = Any amino acid
  VARIANT 15: note = Any amino acid
  VARIANT 16: note = Any amino acid
  VARIANT 17: note = Any amino acid
  VARIANT 18: note = Any amino acid
  VARIANT 19: note = Any amino acid
  VARIANT 20: note = Any amino acid
  VARIANT 21: note = Any amino acid
  VARIANT 22: note = Any amino acid
  VARIANT 23: note = Any amino acid
  VARIANT 24: note = Any amino acid
  VARIANT 25: note = Any amino acid
  VARIANT 26: note = Any amino acid
  VARIANT 27: note = Any amino acid
  VARIANT 28: note = Any amino acid
  VARIANT 29: note = Any amino acid
  VARIANT 30: note = Any amino acid
  VARIANT 32: note = Any amino acid
  VARIANT 33: note = Any amino acid
  VARIANT 34: note = Any amino acid
  VARIANT 35: note = Any amino acid
  VARIANT 36: note = Any amino acid
  VARIANT 37: note = Any amino acid
  VARIANT 38: note = Any amino acid
  VARIANT 41: note = Any amino acid
  VARIANT 42: note = Any amino acid
  VARIANT 43: note = Any amino acid
  VARIANT 44: note = Any amino acid
  VARIANT 45: note = Any amino acid
  VARIANT 46: note = Any amino acid
  VARIANT 47: note = Any amino acid
  VARIANT 48: note = Any amino acid
  VARIANT 49: note = Any amino acid
  VARIANT 50: note = Any amino acid
  VARIANT 51: note = Any amino acid
GXXXXXXXXXXXXXXXXXXXXXXXXXXXXXGXXXXXXXSGXXXXXXXXXXXS

SEQ ID NO: 797164 - protein, 51 aa, unidentified
  VARIANT 2: note = Any amino acid
  VARIANT 3: note = Any amino acid
  VARIANT 4: note = Any amino acid
  VARIANT 5: note = Any amino acid
  VARIANT 6: note = Any amino acid
  VARIANT 7: note = Any amino acid
  VARIANT 8: note = Any amino acid
  VARIANT 9: note = Any amino acid
  VARIANT 10: note = Any amino acid
  VARIANT 11: note = Any amino acid
  VARIANT 12: note = Any amino acid
  VARIANT 13: note = Any amino acid
  VARIANT 14: note = Any amino acid
  VARIANT 15: note = Any amino acid
  VARIANT 16: note = Any amino acid
  VARIANT 17: note = Any amino acid
  VARIANT 18: note = Any amino acid
  VARIANT 19: note = Any amino acid
  VARIANT 20: note = Any amino acid
  VARIANT 21: note = Any amino acid
  VARIANT 22: note = Any amino acid
  VARIANT 23: note = Any amino acid
  VARIANT 24: note = Any amino acid
  VARIANT 25: note = Any amino acid
  VARIANT 26: note = Any amino acid
  VARIANT 27: note = Any amino acid
  VARIANT 28: note = Any amino acid
  VARIANT 29: note = Any amino acid
  VARIANT 30: note = Any amino acid
  VARIANT 32: note = Any amino acid
  VARIANT 33: note = Any amino acid
  VARIANT 34: note = Any amino acid
  VARIANT 35: note = Any amino acid
  VARIANT 36: note = Any amino acid
  VARIANT 37: note = Any amino acid
  VARIANT 38: note = Any amino acid
  VARIANT 41: note = Any amino acid
  VARIANT 42: note = Any amino acid
  VARIANT 43: note = Any amino acid
  VARIANT 44: note = Any amino acid
  VARIANT 45: note = Any amino acid
  VARIANT 46: note = Any amino acid
  VARIANT 47: note = Any amino acid
  VARIANT 48: note = Any amino acid
  VARIANT 49: note = Any amino acid
  VARIANT 50: note = Any amino acid
GXXXXXXXXXXXXXXXXXXXXXXXXXXXXXGXXXXXXXTGXXXXXXXXXXF

SEQ ID NO: 797165 - protein, 57 aa, unidentified
  VARIANT 2: note = Any amino acid
  VARIANT 3: note = Any amino acid
  VARIANT 4: note = Any amino acid
  VARIANT 5: note = Any amino acid
  VARIANT 6: note = Any amino acid
  VARIANT 7: note = Any amino acid
  VARIANT 8: note = Any amino acid
  VARIANT 9: note = Any amino acid
  VARIANT 10: note = Any amino acid
  VARIANT 11: note = Any amino acid
  VARIANT 12: note = Any amino acid
  VARIANT 13: note = Any amino acid
  VARIANT 14: note = Any amino acid
  VARIANT 15: note = Any amino acid
  VARIANT 16: note = Any amino acid
  VARIANT 17: note = Any amino acid
  VARIANT 18: note = Any amino acid
  VARIANT 19: note = Any amino acid
  VARIANT 20: note = Any amino acid
  VARIANT 21: note = Any amino acid
  VARIANT 22: note = Any amino acid
  VARIANT 23: note = Any amino acid
  VARIANT 24: note = Any amino acid
  VARIANT 25: note = Any amino acid
  VARIANT 26: note = Any amino acid
  VARIANT 27: note = Any amino acid
  VARIANT 28: note = Any amino acid
  VARIANT 29: note = Any amino acid
  VARIANT 30: note = Any amino acid
  VARIANT 31: note = Any amino acid
  VARIANT 32: note = Any amino acid
  VARIANT 33: note = Any amino acid
  VARIANT 34: note = Any amino acid
  VARIANT 35: note = Any amino acid
  VARIANT 37: note = Any amino acid
  VARIANT 38: note = Any amino acid
  VARIANT 39: note = Any amino acid
  VARIANT 40: note = Any amino acid
  VARIANT 41: note = Any amino acid
  VARIANT 42: note = Any amino acid
  VARIANT 43: note = Any amino acid
  VARIANT 46: note = Any amino acid
  VARIANT 47: note = Any amino acid
  VARIANT 48: note = Any amino acid
  VARIANT 49: note = Any amino acid
  VARIANT 50: note = Any amino acid
  VARIANT 51: note = Any amino acid
  VARIANT 52: note = Any amino acid
  VARIANT 53: note = Any amino acid
  VARIANT 54: note = Any amino acid
  VARIANT 55: note = Any amino acid
  VARIANT 56: note = Any amino acid
GXXXXXXXXXXXXXXXXXXXXXXXXXXXXXXXXXXGXXXXXXXSGXXXXXXXXXXXG

SEQ ID NO: 797166 - protein, 53 aa, unidentified
  VARIANT 2: note = Any amino acid
  VARIANT 3: note = Any amino acid
  VARIANT 4: note = Any amino acid
  VARIANT 5: note = Any amino acid
  VARIANT 6: note = Any amino acid
  VARIANT 7: note = Any amino acid
  VARIANT 8: note = Any amino acid
  VARIANT 9: note = Any amino acid
  VARIANT 10: note = Any amino acid
  VARIANT 11: note = Any amino acid
  VARIANT 12: note = Any amino acid
  VARIANT 13: note = Any amino acid
  VARIANT 14: note = Any amino acid
  VARIANT 15: note = Any amino acid
  VARIANT 16: note = Any amino acid
  VARIANT 17: note = Any amino acid
  VARIANT 18: note = Any amino acid
  VARIANT 19: note = Any amino acid
  VARIANT 20: note = Any amino acid
  VARIANT 21: note = Any amino acid
  VARIANT 22: note = Any amino acid
  VARIANT 23: note = Any amino acid
  VARIANT 24: note = Any amino acid
  VARIANT 25: note = Any amino acid
  VARIANT 26: note = Any amino acid
  VARIANT 27: note = Any amino acid
  VARIANT 28: note = Any amino acid
  VARIANT 29: note = Any amino acid
  VARIANT 30: note = Any amino acid
  VARIANT 31: note = Any amino acid
  VARIANT 33: note = Any amino acid
  VARIANT 34: note = Any amino acid
  VARIANT 35: note = Any amino acid
  VARIANT 36: note = Any amino acid
  VARIANT 37: note = Any amino acid
  VARIANT 38: note = Any amino acid
  VARIANT 39: note = Any amino acid
  VARIANT 42: note = Any amino acid
  VARIANT 43: note = Any amino acid
  VARIANT 44: note = Any amino acid
  VARIANT 45: note = Any amino acid
  VARIANT 46: note = Any amino acid
  VARIANT 47: note = Any amino acid
  VARIANT 48: note = Any amino acid
  VARIANT 49: note = Any amino acid
  VARIANT 50: note = Any amino acid
  VARIANT 51: note = Any amino acid
  VARIANT 52: note = Any amino acid
GXXXXXXXXXXXXXXXXXXXXXXXXXXXXXXGXXXXXXXSGXXXXXXXXXXXV

SEQ ID NO: 797167 - protein, 52 aa, unidentified
  VARIANT 2: note = Any amino acid
  VARIANT 3: note = Any amino acid
  VARIANT 4: note = Any amino acid
  VARIANT 5: note = Any amino acid
  VARIANT 6: note = Any amino acid
  VARIANT 7: note = Any amino acid
  VARIANT 8: note = Any amino acid
  VARIANT 9: note = Any amino acid
  VARIANT 10: note = Any amino acid
  VARIANT 11: note = Any amino acid
  VARIANT 12: note = Any amino acid
  VARIANT 13: note = Any amino acid
  VARIANT 14: note = Any amino acid
  VARIANT 15: note = Any amino acid
  VARIANT 16: note = Any amino acid
  VARIANT 17: note = Any amino acid
  VARIANT 18: note = Any amino acid
  VARIANT 19: note = Any amino acid
  VARIANT 20: note = Any amino acid
  VARIANT 21: note = Any amino acid
  VARIANT 22: note = Any amino acid
  VARIANT 23: note = Any amino acid
  VARIANT 24: note = Any amino acid
  VARIANT 25: note = Any amino acid
  VARIANT 26: note = Any amino acid
  VARIANT 27: note = Any amino acid
  VARIANT 28: note = Any amino acid
  VARIANT 29: note = Any amino acid
  VARIANT 30: note = Any amino acid
  VARIANT 31: note = Any amino acid
  VARIANT 33: note = Any amino acid
  VARIANT 34: note = Any amino acid
  VARIANT 35: note = Any amino acid
  VARIANT 36: note = Any amino acid
  VARIANT 37: note = Any amino acid
  VARIANT 38: note = Any amino acid
  VARIANT 39: note = Any amino acid
  VARIANT 42: note = Any amino acid
  VARIANT 43: note = Any amino acid
  VARIANT 44: note = Any amino acid
  VARIANT 45: note = Any amino acid
  VARIANT 46: note = Any amino acid
  VARIANT 47: note = Any amino acid
  VARIANT 48: note = Any amino acid
  VARIANT 49: note = Any amino acid
  VARIANT 50: note = Any amino acid
  VARIANT 51: note = Any amino acid
AXXXXXXXXXXXXXXXXXXXXXXXXXXXXXXGXXXXXXXSAXXXXXXXXXXG

SEQ ID NO: 797168 - protein, 55 aa, unidentified
  VARIANT 2: note = Any amino acid
  VARIANT 3: note = Any amino acid
  VARIANT 4: note = Any amino acid
  VARIANT 5: note = Any amino acid
  VARIANT 6: note = Any amino acid
  VARIANT 7: note = Any amino acid
  VARIANT 8: note = Any amino acid
  VARIANT 9: note = Any amino acid
  VARIANT 10: note = Any amino acid
  VARIANT 11: note = Any amino acid
  VARIANT 12: note = Any amino acid
  VARIANT 13: note = Any amino acid
  VARIANT 14: note = Any amino acid
  VARIANT 15: note = Any amino acid
  VARIANT 16: note = Any amino acid
  VARIANT 17: note = Any amino acid
  VARIANT 18: note = Any amino acid
  VARIANT 19: note = Any amino acid
  VARIANT 20: note = Any amino acid
  VARIANT 21: note = Any amino acid
  VARIANT 22: note = Any amino acid
  VARIANT 23: note = Any amino acid
  VARIANT 24: note = Any amino acid
  VARIANT 25: note = Any amino acid
  VARIANT 26: note = Any amino acid
  VARIANT 27: note = Any amino acid
  VARIANT 28: note = Any amino acid
  VARIANT 29: note = Any amino acid
  VARIANT 30: note = Any amino acid
  VARIANT 32: note = Any amino acid
  VARIANT 33: note = Any amino acid
  VARIANT 34: note = Any amino acid
  VARIANT 35: note = Any amino acid
  VARIANT 36: note = Any amino acid
  VARIANT 37: note = Any amino acid
  VARIANT 38: note = Any amino acid
  VARIANT 41: note = Any amino acid
  VARIANT 42: note = Any amino acid
  VARIANT 43: note = Any amino acid
  VARIANT 44: note = Any amino acid
  VARIANT 45: note = Any amino acid
  VARIANT 46: note = Any amino acid
  VARIANT 47: note = Any amino acid
  VARIANT 48: note = Any amino acid
  VARIANT 49: note = Any amino acid
  VARIANT 50: note = Any amino acid
  VARIANT 51: note = Any amino acid
  VARIANT 52: note = Any amino acid
  VARIANT 53: note = Any amino acid
  VARIANT 54: note = Any amino acid
GXXXXXXXXXXXXXXXXXXXXXXXXXXXXXGXXXXXXXSGXXXXXXXXXXXXXXC

SEQ ID NO: 797169 - protein, 53 aa, unidentified
  VARIANT 2: note = Any amino acid
  VARIANT 3: note = Any amino acid
  VARIANT 4: note = Any amino acid
  VARIANT 5: note = Any amino acid
  VARIANT 6: note = Any amino acid
  VARIANT 7: note = Any amino acid
  VARIANT 8: note = Any amino acid
  VARIANT 9: note = Any amino acid
  VARIANT 10: note = Any amino acid
  VARIANT 11: note = Any amino acid
  VARIANT 12: note = Any amino acid
  VARIANT 13: note = Any amino acid
  VARIANT 14: note = Any amino acid
  VARIANT 15: note = Any amino acid
  VARIANT 16: note = Any amino acid
  VARIANT 17: note = Any amino acid
  VARIANT 18: note = Any amino acid
  VARIANT 19: note = Any amino acid
  VARIANT 20: note = Any amino acid
  VARIANT 21: note = Any amino acid
  VARIANT 22: note = Any amino acid
  VARIANT 23: note = Any amino acid
  VARIANT 24: note = Any amino acid
  VARIANT 25: note = Any amino acid
  VARIANT 26: note = Any amino acid
  VARIANT 27: note = Any amino acid
  VARIANT 28: note = Any amino acid
  VARIANT 29: note = Any amino acid
  VARIANT 30: note = Any amino acid
  VARIANT 32: note = Any amino acid
  VARIANT 33: note = Any amino acid
  VARIANT 34: note = Any amino acid
  VARIANT 35: note = Any amino acid
  VARIANT 36: note = Any amino acid
  VARIANT 37: note = Any amino acid
  VARIANT 38: note = Any amino acid
  VARIANT 41: note = Any amino acid
  VARIANT 42: note = Any amino acid
  VARIANT 43: note = Any amino acid
  VARIANT 44: note = Any amino acid
  VARIANT 45: note = Any amino acid
  VARIANT 46: note = Any amino acid
  VARIANT 47: note = Any amino acid
  VARIANT 48: note = Any amino acid
  VARIANT 49: note = Any amino acid
  VARIANT 50: note = Any amino acid
  VARIANT 51: note = Any amino acid
  VARIANT 52: note = Any amino acid
CXXXXXXXXXXXXXXXXXXXXXXXXXXXXXGXXXXXXXSGXXXXXXXXXXXXA

SEQ ID NO: 797170 - protein, 52 aa, unidentified
  VARIANT 2: note = Any amino acid
  VARIANT 3: note = Any amino acid
  VARIANT 4: note = Any amino acid
  VARIANT 5: note = Any amino acid
  VARIANT 6: note = Any amino acid
  VARIANT 7: note = Any amino acid
  VARIANT 8: note = Any amino acid
  VARIANT 9: note = Any amino acid
  VARIANT 10: note = Any amino acid
  VARIANT 11: note = Any amino acid
  VARIANT 12: note = Any amino acid
  VARIANT 13: note = Any amino acid
  VARIANT 14: note = Any amino acid
  VARIANT 15: note = Any amino acid
  VARIANT 16: note = Any amino acid
  VARIANT 17: note = Any amino acid
  VARIANT 18: note = Any amino acid
  VARIANT 19: note = Any amino acid
  VARIANT 20: note = Any amino acid
  VARIANT 21: note = Any amino acid
  VARIANT 22: note = Any amino acid
  VARIANT 23: note = Any amino acid
  VARIANT 24: note = Any amino acid
  VARIANT 25: note = Any amino acid
  VARIANT 26: note = Any amino acid
  VARIANT 27: note = Any amino acid
  VARIANT 28: note = Any amino acid
  VARIANT 29: note = Any amino acid
  VARIANT 31: note = Any amino acid
  VARIANT 32: note = Any amino acid
  VARIANT 33: note = Any amino acid
  VARIANT 34: note = Any amino acid
  VARIANT 35: note = Any amino acid
  VARIANT 36: note = Any amino acid
  VARIANT 37: note = Any amino acid
  VARIANT 40: note = Any amino acid
  VARIANT 41: note = Any amino acid
  VARIANT 42: note = Any amino acid
  VARIANT 43: note = Any amino acid
  VARIANT 44: note = Any amino acid
  VARIANT 45: note = Any amino acid
  VARIANT 46: note = Any amino acid
  VARIANT 47: note = Any amino acid
  VARIANT 48: note = Any amino acid
  VARIANT 49: note = Any amino acid
  VARIANT 50: note = Any amino acid
  VARIANT 51: note = Any amino acid
SXXXXXXXXXXXXXXXXXXXXXXXXXXXXGXXXXXXXSGXXXXXXXXXXXXG

SEQ ID NO: 797171 - protein, 52 aa, unidentified
  VARIANT 2: note = Any amino acid
  VARIANT 3: note = Any amino acid
  VARIANT 4: note = Any amino acid
  VARIANT 5: note = Any amino acid
  VARIANT 6: note = Any amino acid
  VARIANT 7: note = Any amino acid
  VARIANT 8: note = Any amino acid
  VARIANT 9: note = Any amino acid
  VARIANT 10: note = Any amino acid
  VARIANT 11: note = Any amino acid
  VARIANT 12: note = Any amino acid
  VARIANT 13: note = Any amino acid
  VARIANT 14: note = Any amino acid
  VARIANT 15: note = Any amino acid
  VARIANT 16: note = Any amino acid
  VARIANT 17: note = Any amino acid
  VARIANT 18: note = Any amino acid
  VARIANT 19: note = Any amino acid
  VARIANT 20: note = Any amino acid
  VARIANT 21: note = Any amino acid
  VARIANT 22: note = Any amino acid
  VARIANT 23: note = Any amino acid
  VARIANT 24: note = Any amino acid
  VARIANT 25: note = Any amino acid
  VARIANT 26: note = Any amino acid
  VARIANT 27: note = Any amino acid
  VARIANT 28: note = Any amino acid
  VARIANT 29: note = Any amino acid
  VARIANT 30: note = Any amino acid
  VARIANT 32: note = Any amino acid
  VARIANT 33: note = Any amino acid
  VARIANT 34: note = Any amino acid
  VARIANT 35: note = Any amino acid
  VARIANT 36: note = Any amino acid
  VARIANT 37: note = Any amino acid
  VARIANT 38: note = Any amino acid
  VARIANT 41: note = Any amino acid
  VARIANT 42: note = Any amino acid
  VARIANT 43: note = Any amino acid
  VARIANT 44: note = Any amino acid
  VARIANT 45: note = Any amino acid
  VARIANT 46: note = Any amino acid
  VARIANT 47: note = Any amino acid
  VARIANT 48: note = Any amino acid
  VARIANT 49: note = Any amino acid
  VARIANT 50: note = Any amino acid
  VARIANT 51: note = Any amino acid
SXXXXXXXXXXXXXXXXXXXXXXXXXXXXXGXXXXXXXSGXXXXXXXXXXXG

SEQ ID NO: 797172 - protein, 53 aa, unidentified
  VARIANT 2: note = Any amino acid
  VARIANT 3: note = Any amino acid
  VARIANT 4: note = Any amino acid
  VARIANT 5: note = Any amino acid
  VARIANT 6: note = Any amino acid
  VARIANT 7: note = Any amino acid
  VARIANT 8: note = Any amino acid
  VARIANT 9: note = Any amino acid
  VARIANT 10: note = Any amino acid
  VARIANT 11: note = Any amino acid
  VARIANT 12: note = Any amino acid
  VARIANT 13: note = Any amino acid
  VARIANT 14: note = Any amino acid
  VARIANT 15: note = Any amino acid
  VARIANT 16: note = Any amino acid
  VARIANT 17: note = Any amino acid
  VARIANT 18: note = Any amino acid
  VARIANT 19: note = Any amino acid
  VARIANT 20: note = Any amino acid
  VARIANT 21: note = Any amino acid
  VARIANT 22: note = Any amino acid
  VARIANT 23: note = Any amino acid
  VARIANT 24: note = Any amino acid
  VARIANT 25: note = Any amino acid
  VARIANT 26: note = Any amino acid
  VARIANT 27: note = Any amino acid
  VARIANT 28: note = Any amino acid
  VARIANT 29: note = Any amino acid
  VARIANT 30: note = Any amino acid
  VARIANT 31: note = Any amino acid
  VARIANT 33: note = Any amino acid
  VARIANT 34: note = Any amino acid
  VARIANT 35: note = Any amino acid
  VARIANT 36: note = Any amino acid
  VARIANT 37: note = Any amino acid
  VARIANT 38: note = Any amino acid
  VARIANT 39: note = Any amino acid
  VARIANT 42: note = Any amino acid
  VARIANT 43: note = Any amino acid
  VARIANT 44: note = Any amino acid
  VARIANT 45: note = Any amino acid
  VARIANT 46: note = Any amino acid
  VARIANT 47: note = Any amino acid
  VARIANT 48: note = Any amino acid
  VARIANT 49: note = Any amino acid
  VARIANT 50: note = Any amino acid
  VARIANT 51: note = Any amino acid
  VARIANT 52: note = Any amino acid
GXXXXXXXXXXXXXXXXXXXXXXXXXXXXXXGXXXXXXXSAXXXXXXXXXXXN

SEQ ID NO: 797173 - protein, 52 aa, unidentified
  VARIANT 2: note = Any amino acid
  VARIANT 3: note = Any amino acid
  VARIANT 4: note = Any amino acid
  VARIANT 5: note = Any amino acid
  VARIANT 6: note = Any amino acid
  VARIANT 7: note = Any amino acid
  VARIANT 8: note = Any amino acid
  VARIANT 9: note = Any amino acid
  VARIANT 10: note = Any amino acid
  VARIANT 11: note = Any amino acid
  VARIANT 12: note = Any amino acid
  VARIANT 13: note = Any amino acid
  VARIANT 14: note = Any amino acid
  VARIANT 15: note = Any amino acid
  VARIANT 16: note = Any amino acid
  VARIANT 17: note = Any amino acid
  VARIANT 18: note = Any amino acid
  VARIANT 19: note = Any amino acid
  VARIANT 20: note = Any amino acid
  VARIANT 21: note = Any amino acid
  VARIANT 22: note = Any amino acid
  VARIANT 23: note = Any amino acid
  VARIANT 24: note = Any amino acid
  VARIANT 25: note = Any amino acid
  VARIANT 26: note = Any amino acid
  VARIANT 27: note = Any amino acid
  VARIANT 28: note = Any amino acid
  VARIANT 29: note = Any amino acid
  VARIANT 30: note = Any amino acid
  VARIANT 31: note = Any amino acid
  VARIANT 33: note = Any amino acid
  VARIANT 34: note = Any amino acid
  VARIANT 35: note = Any amino acid
  VARIANT 36: note = Any amino acid
  VARIANT 37: note = Any amino acid
  VARIANT 38: note = Any amino acid
  VARIANT 39: note = Any amino acid
  VARIANT 42: note = Any amino acid
  VARIANT 43: note = Any amino acid
  VARIANT 44: note = Any amino acid
  VARIANT 45: note = Any amino acid
  VARIANT 46: note = Any amino acid
  VARIANT 47: note = Any amino acid
  VARIANT 48: note = Any amino acid
  VARIANT 49: note = Any amino acid
  VARIANT 50: note = Any amino acid
  VARIANT 51: note = Any amino acid
GXXXXXXXXXXXXXXXXXXXXXXXXXXXXXXGXXXXXXXTGXXXXXXXXXXT

SEQ ID NO: 797174 - protein, 53 aa, unidentified
  VARIANT 2: note = Any amino acid
  VARIANT 3: note = Any amino acid
  VARIANT 4: note = Any amino acid
  VARIANT 5: note = Any amino acid
  VARIANT 6: note = Any amino acid
  VARIANT 7: note = Any amino acid
  VARIANT 8: note = Any amino acid
  VARIANT 9: note = Any amino acid
  VARIANT 10: note = Any amino acid
  VARIANT 11: note = Any amino acid
  VARIANT 12: note = Any amino acid
  VARIANT 13: note = Any amino acid
  VARIANT 14: note = Any amino acid
  VARIANT 15: note = Any amino acid
  VARIANT 16: note = Any amino acid
  VARIANT 17: note = Any amino acid
  VARIANT 18: note = Any amino acid
  VARIANT 19: note = Any amino acid
  VARIANT 20: note = Any amino acid
  VARIANT 21: note = Any amino acid
  VARIANT 22: note = Any amino acid
  VARIANT 23: note = Any amino acid
  VARIANT 24: note = Any amino acid
  VARIANT 25: note = Any amino acid
  VARIANT 26: note = Any amino acid
  VARIANT 27: note = Any amino acid
  VARIANT 28: note = Any amino acid
  VARIANT 29: note = Any amino acid
  VARIANT 30: note = Any amino acid
  VARIANT 32: note = Any amino acid
  VARIANT 33: note = Any amino acid
  VARIANT 34: note = Any amino acid
  VARIANT 35: note = Any amino acid
  VARIANT 36: note = Any amino acid
  VARIANT 37: note = Any amino acid
  VARIANT 38: note = Any amino acid
  VARIANT 41: note = Any amino acid
  VARIANT 42: note = Any amino acid
  VARIANT 43: note = Any amino acid
  VARIANT 44: note = Any amino acid
  VARIANT 45: note = Any amino acid
  VARIANT 46: note = Any amino acid
  VARIANT 47: note = Any amino acid
  VARIANT 48: note = Any amino acid
  VARIANT 49: note = Any amino acid
  VARIANT 50: note = Any amino acid
  VARIANT 51: note = Any amino acid
  VARIANT 52: note = Any amino acid
SXXXXXXXXXXXXXXXXXXXXXXXXXXXXXGXXXXXXXSGXXXXXXXXXXXXA

SEQ ID NO: 797175 - protein, 51 aa, unidentified
  VARIANT 2: note = Any amino acid
  VARIANT 3: note = Any amino acid
  VARIANT 4: note = Any amino acid
  VARIANT 5: note = Any amino acid
  VARIANT 6: note = Any amino acid
  VARIANT 7: note = Any amino acid
  VARIANT 8: note = Any amino acid
  VARIANT 9: note = Any amino acid
  VARIANT 10: note = Any amino acid
  VARIANT 11: note = Any amino acid
  VARIANT 12: note = Any amino acid
  VARIANT 13: note = Any amino acid
  VARIANT 14: note = Any amino acid
  VARIANT 15: note = Any amino acid
  VARIANT 16: note = Any amino acid
  VARIANT 17: note = Any amino acid
  VARIANT 18: note = Any amino acid
  VARIANT 19: note = Any amino acid
  VARIANT 20: note = Any amino acid
  VARIANT 21: note = Any amino acid
  VARIANT 22: note = Any amino acid
  VARIANT 23: note = Any amino acid
  VARIANT 24: note = Any amino acid
  VARIANT 25: note = Any amino acid
  VARIANT 26: note = Any amino acid
  VARIANT 27: note = Any amino acid
  VARIANT 28: note = Any amino acid
  VARIANT 29: note = Any amino acid
  VARIANT 31: note = Any amino acid
  VARIANT 32: note = Any amino acid
  VARIANT 33: note = Any amino acid
  VARIANT 34: note = Any amino acid
  VARIANT 35: note = Any amino acid
  VARIANT 36: note = Any amino acid
  VARIANT 37: note = Any amino acid
  VARIANT 40: note = Any amino acid
  VARIANT 41: note = Any amino acid
  VARIANT 42: note = Any amino acid
  VARIANT 43: note = Any amino acid
  VARIANT 44: note = Any amino acid
  VARIANT 45: note = Any amino acid
  VARIANT 46: note = Any amino acid
  VARIANT 47: note = Any amino acid
  VARIANT 48: note = Any amino acid
  VARIANT 49: note = Any amino acid
  VARIANT 50: note = Any amino acid
AXXXXXXXXXXXXXXXXXXXXXXXXXXXXGXXXXXXXSGXXXXXXXXXXXG

SEQ ID NO: 797176 - protein, 53 aa, unidentified
  VARIANT 2: note = Any amino acid
  VARIANT 3: note = Any amino acid
  VARIANT 4: note = Any amino acid
  VARIANT 5: note = Any amino acid
  VARIANT 6: note = Any amino acid
  VARIANT 7: note = Any amino acid
  VARIANT 8: note = Any amino acid
  VARIANT 9: note = Any amino acid
  VARIANT 10: note = Any amino acid
  VARIANT 11: note = Any amino acid
  VARIANT 12: note = Any amino acid
  VARIANT 13: note = Any amino acid
  VARIANT 14: note = Any amino acid
  VARIANT 15: note = Any amino acid
  VARIANT 16: note = Any amino acid
  VARIANT 17: note = Any amino acid
  VARIANT 18: note = Any amino acid
  VARIANT 19: note = Any amino acid
  VARIANT 20: note = Any amino acid
  VARIANT 21: note = Any amino acid
  VARIANT 22: note = Any amino acid
  VARIANT 23: note = Any amino acid
  VARIANT 24: note = Any amino acid
  VARIANT 25: note = Any amino acid
  VARIANT 26: note = Any amino acid
  VARIANT 27: note = Any amino acid
  VARIANT 28: note = Any amino acid
  VARIANT 29: note = Any amino acid
  VARIANT 30: note = Any amino acid
  VARIANT 32: note = Any amino acid
  VARIANT 33: note = Any amino acid
  VARIANT 34: note = Any amino acid
  VARIANT 35: note = Any amino acid
  VARIANT 36: note = Any amino acid
  VARIANT 37: note = Any amino acid
  VARIANT 38: note = Any amino acid
  VARIANT 41: note = Any amino acid
  VARIANT 42: note = Any amino acid
  VARIANT 43: note = Any amino acid
  VARIANT 44: note = Any amino acid
  VARIANT 45: note = Any amino acid
  VARIANT 46: note = Any amino acid
  VARIANT 47: note = Any amino acid
  VARIANT 48: note = Any amino acid
  VARIANT 49: note = Any amino acid
  VARIANT 50: note = Any amino acid
  VARIANT 51: note = Any amino acid
  VARIANT 52: note = Any amino acid
CXXXXXXXXXXXXXXXXXXXXXXXXXXXXXGXXXXXXXSGXXXXXXXXXXXXG

SEQ ID NO: 797177 - protein, 53 aa, unidentified
  VARIANT 2: note = Any amino acid
  VARIANT 3: note = Any amino acid
  VARIANT 4: note = Any amino acid
  VARIANT 5: note = Any amino acid
  VARIANT 6: note = Any amino acid
  VARIANT 7: note = Any amino acid
  VARIANT 8: note = Any amino acid
  VARIANT 9: note = Any amino acid
  VARIANT 10: note = Any amino acid
  VARIANT 11: note = Any amino acid
  VARIANT 12: note = Any amino acid
  VARIANT 13: note = Any amino acid
  VARIANT 14: note = Any amino acid
  VARIANT 15: note = Any amino acid
  VARIANT 16: note = Any amino acid
  VARIANT 17: note = Any amino acid
  VARIANT 18: note = Any amino acid
  VARIANT 19: note = Any amino acid
  VARIANT 20: note = Any amino acid
  VARIANT 21: note = Any amino acid
  VARIANT 22: note = Any amino acid
  VARIANT 23: note = Any amino acid
  VARIANT 24: note = Any amino acid
  VARIANT 25: note = Any amino acid
  VARIANT 26: note = Any amino acid
  VARIANT 27: note = Any amino acid
  VARIANT 28: note = Any amino acid
  VARIANT 29: note = Any amino acid
  VARIANT 30: note = Any amino acid
  VARIANT 32: note = Any amino acid
  VARIANT 33: note = Any amino acid
  VARIANT 34: note = Any amino acid
  VARIANT 35: note = Any amino acid
  VARIANT 36: note = Any amino acid
  VARIANT 37: note = Any amino acid
  VARIANT 38: note = Any amino acid
  VARIANT 41: note = Any amino acid
  VARIANT 42: note = Any amino acid
  VARIANT 43: note = Any amino acid
  VARIANT 44: note = Any amino acid
  VARIANT 45: note = Any amino acid
  VARIANT 46: note = Any amino acid
  VARIANT 47: note = Any amino acid
  VARIANT 48: note = Any amino acid
  VARIANT 49: note = Any amino acid
  VARIANT 50: note = Any amino acid
  VARIANT 51: note = Any amino acid
  VARIANT 52: note = Any amino acid
GXXXXXXXXXXXXXXXXXXXXXXXXXXXXXSXXXXXXXSGXXXXXXXXXXXXG

SEQ ID NO: 797178 - protein, 53 aa, unidentified
  VARIANT 2: note = Any amino acid
  VARIANT 3: note = Any amino acid
  VARIANT 4: note = Any amino acid
  VARIANT 5: note = Any amino acid
  VARIANT 6: note = Any amino acid
  VARIANT 7: note = Any amino acid
  VARIANT 8: note = Any amino acid
  VARIANT 9: note = Any amino acid
  VARIANT 10: note = Any amino acid
  VARIANT 11: note = Any amino acid
  VARIANT 12: note = Any amino acid
  VARIANT 13: note = Any amino acid
  VARIANT 14: note = Any amino acid
  VARIANT 15: note = Any amino acid
  VARIANT 16: note = Any amino acid
  VARIANT 17: note = Any amino acid
  VARIANT 18: note = Any amino acid
  VARIANT 19: note = Any amino acid
  VARIANT 20: note = Any amino acid
  VARIANT 21: note = Any amino acid
  VARIANT 22: note = Any amino acid
  VARIANT 23: note = Any amino acid
  VARIANT 24: note = Any amino acid
  VARIANT 25: note = Any amino acid
  VARIANT 26: note = Any amino acid
  VARIANT 27: note = Any amino acid
  VARIANT 28: note = Any amino acid
  VARIANT 29: note = Any amino acid
  VARIANT 30: note = Any amino acid
  VARIANT 31: note = Any amino acid
  VARIANT 32: note = Any amino acid
  VARIANT 34: note = Any amino acid
  VARIANT 35: note = Any amino acid
  VARIANT 36: note = Any amino acid
  VARIANT 37: note = Any amino acid
  VARIANT 38: note = Any amino acid
  VARIANT 39: note = Any amino acid
  VARIANT 40: note = Any amino acid
  VARIANT 43: note = Any amino acid
  VARIANT 44: note = Any amino acid
  VARIANT 45: note = Any amino acid
  VARIANT 46: note = Any amino acid
  VARIANT 47: note = Any amino acid
  VARIANT 48: note = Any amino acid
  VARIANT 49: note = Any amino acid
  VARIANT 50: note = Any amino acid
  VARIANT 51: note = Any amino acid
  VARIANT 52: note = Any amino acid
GXXXXXXXXXXXXXXXXXXXXXXXXXXXXXXXGXXXXXXXSGXXXXXXXXXXC

SEQ ID NO: 797179 - protein, 52 aa, unidentified
  VARIANT 2: note = Any amino acid
  VARIANT 3: note = Any amino acid
  VARIANT 4: note = Any amino acid
  VARIANT 5: note = Any amino acid
  VARIANT 6: note = Any amino acid
  VARIANT 7: note = Any amino acid
  VARIANT 8: note = Any amino acid
  VARIANT 9: note = Any amino acid
  VARIANT 10: note = Any amino acid
  VARIANT 11: note = Any amino acid
  VARIANT 12: note = Any amino acid
  VARIANT 13: note = Any amino acid
  VARIANT 14: note = Any amino acid
  VARIANT 15: note = Any amino acid
  VARIANT 16: note = Any amino acid
  VARIANT 17: note = Any amino acid
  VARIANT 18: note = Any amino acid
  VARIANT 19: note = Any amino acid
  VARIANT 20: note = Any amino acid
  VARIANT 21: note = Any amino acid
  VARIANT 22: note = Any amino acid
  VARIANT 23: note = Any amino acid
  VARIANT 24: note = Any amino acid
  VARIANT 25: note = Any amino acid
  VARIANT 26: note = Any amino acid
  VARIANT 27: note = Any amino acid
  VARIANT 28: note = Any amino acid
  VARIANT 29: note = Any amino acid
  VARIANT 30: note = Any amino acid
  VARIANT 32: note = Any amino acid
  VARIANT 33: note = Any amino acid
  VARIANT 34: note = Any amino acid
  VARIANT 35: note = Any amino acid
  VARIANT 36: note = Any amino acid
  VARIANT 37: note = Any amino acid
  VARIANT 38: note = Any amino acid
  VARIANT 41: note = Any amino acid
  VARIANT 42: note = Any amino acid
  VARIANT 43: note = Any amino acid
  VARIANT 44: note = Any amino acid
  VARIANT 45: note = Any amino acid
  VARIANT 46: note = Any amino acid
  VARIANT 47: note = Any amino acid
  VARIANT 48: note = Any amino acid
  VARIANT 49: note = Any amino acid
  VARIANT 50: note = Any amino acid
  VARIANT 51: note = Any amino acid
CXXXXXXXXXXXXXXXXXXXXXXXXXXXXXGXXXXXXXSGXXXXXXXXXXXG

SEQ ID NO: 797180 - protein, 53 aa, unidentified
  VARIANT 2: note = Any amino acid
  VARIANT 3: note = Any amino acid
  VARIANT 4: note = Any amino acid
  VARIANT 5: note = Any amino acid
  VARIANT 6: note = Any amino acid
  VARIANT 7: note = Any amino acid
  VARIANT 8: note = Any amino acid
  VARIANT 9: note = Any amino acid
  VARIANT 10: note = Any amino acid
  VARIANT 11: note = Any amino acid
  VARIANT 12: note = Any amino acid
  VARIANT 13: note = Any amino acid
  VARIANT 14: note = Any amino acid
  VARIANT 15: note = Any amino acid
  VARIANT 16: note = Any amino acid
  VARIANT 17: note = Any amino acid
  VARIANT 18: note = Any amino acid
  VARIANT 19: note = Any amino acid
  VARIANT 20: note = Any amino acid
  VARIANT 21: note = Any amino acid
  VARIANT 22: note = Any amino acid
  VARIANT 23: note = Any amino acid
  VARIANT 24: note = Any amino acid
  VARIANT 25: note = Any amino acid
  VARIANT 26: note = Any amino acid
  VARIANT 27: note = Any amino acid
  VARIANT 28: note = Any amino acid
  VARIANT 29: note = Any amino acid
  VARIANT 30: note = Any amino acid
  VARIANT 32: note = Any amino acid
  VARIANT 33: note = Any amino acid
  VARIANT 34: note = Any amino acid
  VARIANT 35: note = Any amino acid
  VARIANT 36: note = Any amino acid
  VARIANT 37: note = Any amino acid
  VARIANT 38: note = Any amino acid
  VARIANT 41: note = Any amino acid
  VARIANT 42: note = Any amino acid
  VARIANT 43: note = Any amino acid
  VARIANT 44: note = Any amino acid
  VARIANT 45: note = Any amino acid
  VARIANT 46: note = Any amino acid
  VARIANT 47: note = Any amino acid
  VARIANT 48: note = Any amino acid
  VARIANT 49: note = Any amino acid
  VARIANT 50: note = Any amino acid
  VARIANT 51: note = Any amino acid
  VARIANT 52: note = Any amino acid
GXXXXXXXXXXXXXXXXXXXXXXXXXXXXXGXXXXXXXSDXXXXXXXXXXXXC

SEQ ID NO: 797181 - protein, 51 aa, unidentified
  VARIANT 2: note = Any amino acid
  VARIANT 3: note = Any amino acid
  VARIANT 4: note = Any amino acid
  VARIANT 5: note = Any amino acid
  VARIANT 6: note = Any amino acid
  VARIANT 7: note = Any amino acid
  VARIANT 8: note = Any amino acid
  VARIANT 9: note = Any amino acid
  VARIANT 10: note = Any amino acid
  VARIANT 11: note = Any amino acid
  VARIANT 12: note = Any amino acid
  VARIANT 13: note = Any amino acid
  VARIANT 14: note = Any amino acid
  VARIANT 15: note = Any amino acid
  VARIANT 16: note = Any amino acid
  VARIANT 17: note = Any amino acid
  VARIANT 18: note = Any amino acid
  VARIANT 19: note = Any amino acid
  VARIANT 20: note = Any amino acid
  VARIANT 21: note = Any amino acid
  VARIANT 22: note = Any amino acid
  VARIANT 23: note = Any amino acid
  VARIANT 24: note = Any amino acid
  VARIANT 25: note = Any amino acid
  VARIANT 26: note = Any amino acid
  VARIANT 27: note = Any amino acid
  VARIANT 28: note = Any amino acid
  VARIANT 29: note = Any amino acid
  VARIANT 30: note = Any amino acid
  VARIANT 32: note = Any amino acid
  VARIANT 33: note = Any amino acid
  VARIANT 34: note = Any amino acid
  VARIANT 35: note = Any amino acid
  VARIANT 36: note = Any amino acid
  VARIANT 37: note = Any amino acid
  VARIANT 38: note = Any amino acid
  VARIANT 41: note = Any amino acid
  VARIANT 42: note = Any amino acid
  VARIANT 43: note = Any amino acid
  VARIANT 44: note = Any amino acid
  VARIANT 45: note = Any amino acid
  VARIANT 46: note = Any amino acid
  VARIANT 47: note = Any amino acid
  VARIANT 48: note = Any amino acid
  VARIANT 49: note = Any amino acid
  VARIANT 50: note = Any amino acid
GXXXXXXXXXXXXXXXXXXXXXXXXXXXXXGXXXXXXXTGXXXXXXXXXXG

SEQ ID NO: 797182 - protein, 53 aa, unidentified
  VARIANT 2: note = Any amino acid
  VARIANT 3: note = Any amino acid
  VARIANT 4: note = Any amino acid
  VARIANT 5: note = Any amino acid
  VARIANT 6: note = Any amino acid
  VARIANT 7: note = Any amino acid
  VARIANT 8: note = Any amino acid
  VARIANT 9: note = Any amino acid
  VARIANT 10: note = Any amino acid
  VARIANT 11: note = Any amino acid
  VARIANT 12: note = Any amino acid
  VARIANT 13: note = Any amino acid
  VARIANT 14: note = Any amino acid
  VARIANT 15: note = Any amino acid
  VARIANT 16: note = Any amino acid
  VARIANT 17: note = Any amino acid
  VARIANT 18: note = Any amino acid
  VARIANT 19: note = Any amino acid
  VARIANT 20: note = Any amino acid
  VARIANT 21: note = Any amino acid
  VARIANT 22: note = Any amino acid
  VARIANT 23: note = Any amino acid
  VARIANT 24: note = Any amino acid
  VARIANT 25: note = Any amino acid
  VARIANT 26: note = Any amino acid
  VARIANT 27: note = Any amino acid
  VARIANT 28: note = Any amino acid
  VARIANT 29: note = Any amino acid
  VARIANT 30: note = Any amino acid
  VARIANT 31: note = Any amino acid
  VARIANT 33: note = Any amino acid
  VARIANT 34: note = Any amino acid
  VARIANT 35: note = Any amino acid
  VARIANT 36: note = Any amino acid
  VARIANT 37: note = Any amino acid
  VARIANT 38: note = Any amino acid
  VARIANT 39: note = Any amino acid
  VARIANT 42: note = Any amino acid
  VARIANT 43: note = Any amino acid
  VARIANT 44: note = Any amino acid
  VARIANT 45: note = Any amino acid
  VARIANT 46: note = Any amino acid
  VARIANT 47: note = Any amino acid
  VARIANT 48: note = Any amino acid
  VARIANT 49: note = Any amino acid
  VARIANT 50: note = Any amino acid
  VARIANT 51: note = Any amino acid
  VARIANT 52: note = Any amino acid
GXXXXXXXXXXXXXXXXXXXXXXXXXXXXXXGXXXXXXXSGXXXXXXXXXXXH

SEQ ID NO: 797183 - protein, 50 aa, unidentified
  VARIANT 2: note = Any amino acid
  VARIANT 3: note = Any amino acid
  VARIANT 4: note = Any amino acid
  VARIANT 5: note = Any amino acid
  VARIANT 6: note = Any amino acid
  VARIANT 7: note = Any amino acid
  VARIANT 8: note = Any amino acid
  VARIANT 9: note = Any amino acid
  VARIANT 10: note = Any amino acid
  VARIANT 11: note = Any amino acid
  VARIANT 12: note = Any amino acid
  VARIANT 13: note = Any amino acid
  VARIANT 14: note = Any amino acid
  VARIANT 15: note = Any amino acid
  VARIANT 16: note = Any amino acid
  VARIANT 17: note = Any amino acid
  VARIANT 18: note = Any amino acid
  VARIANT 19: note = Any amino acid
  VARIANT 20: note = Any amino acid
  VARIANT 21: note = Any amino acid
  VARIANT 22: note = Any amino acid
  VARIANT 23: note = Any amino acid
  VARIANT 24: note = Any amino acid
  VARIANT 25: note = Any amino acid
  VARIANT 26: note = Any amino acid
  VARIANT 27: note = Any amino acid
  VARIANT 29: note = Any amino acid
  VARIANT 30: note = Any amino acid
  VARIANT 31: note = Any amino acid
  VARIANT 32: note = Any amino acid
  VARIANT 33: note = Any amino acid
  VARIANT 34: note = Any amino acid
  VARIANT 35: note = Any amino acid
  VARIANT 38: note = Any amino acid
  VARIANT 39: note = Any amino acid
  VARIANT 40: note = Any amino acid
  VARIANT 41: note = Any amino acid
  VARIANT 42: note = Any amino acid
  VARIANT 43: note = Any amino acid
  VARIANT 44: note = Any amino acid
  VARIANT 45: note = Any amino acid
  VARIANT 46: note = Any amino acid
  VARIANT 47: note = Any amino acid
  VARIANT 48: note = Any amino acid
  VARIANT 49: note = Any amino acid
GXXXXXXXXXXXXXXXXXXXXXXXXXXGXXXXXXXSGXXXXXXXXXXXXG

SEQ ID NO: 797184 - protein, 52 aa, unidentified
  VARIANT 2: note = Any amino acid
  VARIANT 3: note = Any amino acid
  VARIANT 4: note = Any amino acid
  VARIANT 5: note = Any amino acid
  VARIANT 6: note = Any amino acid
  VARIANT 7: note = Any amino acid
  VARIANT 8: note = Any amino acid
  VARIANT 9: note = Any amino acid
  VARIANT 10: note = Any amino acid
  VARIANT 11: note = Any amino acid
  VARIANT 12: note = Any amino acid
  VARIANT 13: note = Any amino acid
  VARIANT 14: note = Any amino acid
  VARIANT 15: note = Any amino acid
  VARIANT 16: note = Any amino acid
  VARIANT 17: note = Any amino acid
  VARIANT 18: note = Any amino acid
  VARIANT 19: note = Any amino acid
  VARIANT 20: note = Any amino acid
  VARIANT 21: note = Any amino acid
  VARIANT 22: note = Any amino acid
  VARIANT 23: note = Any amino acid
  VARIANT 24: note = Any amino acid
  VARIANT 25: note = Any amino acid
  VARIANT 26: note = Any amino acid
  VARIANT 27: note = Any amino acid
  VARIANT 28: note = Any amino acid
  VARIANT 29: note = Any amino acid
  VARIANT 30: note = Any amino acid
  VARIANT 32: note = Any amino acid
  VARIANT 33: note = Any amino acid
  VARIANT 34: note = Any amino acid
  VARIANT 35: note = Any amino acid
  VARIANT 36: note = Any amino acid
  VARIANT 37: note = Any amino acid
  VARIANT 38: note = Any amino acid
  VARIANT 41: note = Any amino acid
  VARIANT 42: note = Any amino acid
  VARIANT 43: note = Any amino acid
  VARIANT 44: note = Any amino acid
  VARIANT 45: note = Any amino acid
  VARIANT 46: note = Any amino acid
  VARIANT 47: note = Any amino acid
  VARIANT 48: note = Any amino acid
  VARIANT 49: note = Any amino acid
  VARIANT 50: note = Any amino acid
  VARIANT 51: note = Any amino acid
GXXXXXXXXXXXXXXXXXXXXXXXXXXXXXGXXXXXXXSGXXXXXXXXXXXV

SEQ ID NO: 797185 - protein, 53 aa, unidentified
  VARIANT 2: note = Any amino acid
  VARIANT 3: note = Any amino acid
  VARIANT 4: note = Any amino acid
  VARIANT 5: note = Any amino acid
  VARIANT 6: note = Any amino acid
  VARIANT 7: note = Any amino acid
  VARIANT 8: note = Any amino acid
  VARIANT 9: note = Any amino acid
  VARIANT 10: note = Any amino acid
  VARIANT 11: note = Any amino acid
  VARIANT 12: note = Any amino acid
  VARIANT 13: note = Any amino acid
  VARIANT 14: note = Any amino acid
  VARIANT 15: note = Any amino acid
  VARIANT 16: note = Any amino acid
  VARIANT 17: note = Any amino acid
  VARIANT 18: note = Any amino acid
  VARIANT 19: note = Any amino acid
  VARIANT 20: note = Any amino acid
  VARIANT 21: note = Any amino acid
  VARIANT 22: note = Any amino acid
  VARIANT 23: note = Any amino acid
  VARIANT 24: note = Any amino acid
  VARIANT 25: note = Any amino acid
  VARIANT 26: note = Any amino acid
  VARIANT 27: note = Any amino acid
  VARIANT 28: note = Any amino acid
  VARIANT 29: note = Any amino acid
  VARIANT 30: note = Any amino acid
  VARIANT 32: note = Any amino acid
  VARIANT 33: note = Any amino acid
  VARIANT 34: note = Any amino acid
  VARIANT 35: note = Any amino acid
  VARIANT 36: note = Any amino acid
  VARIANT 37: note = Any amino acid
  VARIANT 38: note = Any amino acid
  VARIANT 41: note = Any amino acid
  VARIANT 42: note = Any amino acid
  VARIANT 43: note = Any amino acid
  VARIANT 44: note = Any amino acid
  VARIANT 45: note = Any amino acid
  VARIANT 46: note = Any amino acid
  VARIANT 47: note = Any amino acid
  VARIANT 48: note = Any amino acid
  VARIANT 49: note = Any amino acid
  VARIANT 50: note = Any amino acid
  VARIANT 51: note = Any amino acid
  VARIANT 52: note = Any amino acid
GXXXXXXXXXXXXXXXXXXXXXXXXXXXXXGXXXXXXXSDXXXXXXXXXXXXG

SEQ ID NO: 797186 - protein, 53 aa, unidentified
  VARIANT 2: note = Any amino acid
  VARIANT 3: note = Any amino acid
  VARIANT 4: note = Any amino acid
  VARIANT 5: note = Any amino acid
  VARIANT 6: note = Any amino acid
  VARIANT 7: note = Any amino acid
  VARIANT 8: note = Any amino acid
  VARIANT 9: note = Any amino acid
  VARIANT 10: note = Any amino acid
  VARIANT 11: note = Any amino acid
  VARIANT 12: note = Any amino acid
  VARIANT 13: note = Any amino acid
  VARIANT 14: note = Any amino acid
  VARIANT 15: note = Any amino acid
  VARIANT 16: note = Any amino acid
  VARIANT 17: note = Any amino acid
  VARIANT 18: note = Any amino acid
  VARIANT 19: note = Any amino acid
  VARIANT 20: note = Any amino acid
  VARIANT 21: note = Any amino acid
  VARIANT 22: note = Any amino acid
  VARIANT 23: note = Any amino acid
  VARIANT 24: note = Any amino acid
  VARIANT 25: note = Any amino acid
  VARIANT 26: note = Any amino acid
  VARIANT 27: note = Any amino acid
  VARIANT 28: note = Any amino acid
  VARIANT 29: note = Any amino acid
  VARIANT 30: note = Any amino acid
  VARIANT 32: note = Any amino acid
  VARIANT 33: note = Any amino acid
  VARIANT 34: note = Any amino acid
  VARIANT 35: note = Any amino acid
  VARIANT 36: note = Any amino acid
  VARIANT 37: note = Any amino acid
  VARIANT 38: note = Any amino acid
  VARIANT 41: note = Any amino acid
  VARIANT 42: note = Any amino acid
  VARIANT 43: note = Any amino acid
  VARIANT 44: note = Any amino acid
  VARIANT 45: note = Any amino acid
  VARIANT 46: note = Any amino acid
  VARIANT 47: note = Any amino acid
  VARIANT 48: note = Any amino acid
  VARIANT 49: note = Any amino acid
  VARIANT 50: note = Any amino acid
  VARIANT 51: note = Any amino acid
  VARIANT 52: note = Any amino acid
RXXXXXXXXXXXXXXXXXXXXXXXXXXXXXGXXXXXXXSGXXXXXXXXXXXXG

SEQ ID NO: 797187 - protein, 53 aa, unidentified
  VARIANT 2: note = Any amino acid
  VARIANT 3: note = Any amino acid
  VARIANT 4: note = Any amino acid
  VARIANT 5: note = Any amino acid
  VARIANT 6: note = Any amino acid
  VARIANT 7: note = Any amino acid
  VARIANT 8: note = Any amino acid
  VARIANT 9: note = Any amino acid
  VARIANT 10: note = Any amino acid
  VARIANT 11: note = Any amino acid
  VARIANT 12: note = Any amino acid
  VARIANT 13: note = Any amino acid
  VARIANT 14: note = Any amino acid
  VARIANT 15: note = Any amino acid
  VARIANT 16: note = Any amino acid
  VARIANT 17: note = Any amino acid
  VARIANT 18: note = Any amino acid
  VARIANT 19: note = Any amino acid
  VARIANT 20: note = Any amino acid
  VARIANT 21: note = Any amino acid
  VARIANT 22: note = Any amino acid
  VARIANT 23: note = Any amino acid
  VARIANT 24: note = Any amino acid
  VARIANT 25: note = Any amino acid
  VARIANT 26: note = Any amino acid
  VARIANT 27: note = Any amino acid
  VARIANT 28: note = Any amino acid
  VARIANT 29: note = Any amino acid
  VARIANT 30: note = Any amino acid
  VARIANT 31: note = Any amino acid
  VARIANT 32: note = Any amino acid
  VARIANT 34: note = Any amino acid
  VARIANT 35: note = Any amino acid
  VARIANT 36: note = Any amino acid
  VARIANT 37: note = Any amino acid
  VARIANT 38: note = Any amino acid
  VARIANT 39: note = Any amino acid
  VARIANT 40: note = Any amino acid
  VARIANT 43: note = Any amino acid
  VARIANT 44: note = Any amino acid
  VARIANT 45: note = Any amino acid
  VARIANT 46: note = Any amino acid
  VARIANT 47: note = Any amino acid
  VARIANT 48: note = Any amino acid
  VARIANT 49: note = Any amino acid
  VARIANT 50: note = Any amino acid
  VARIANT 51: note = Any amino acid
  VARIANT 52: note = Any amino acid
GXXXXXXXXXXXXXXXXXXXXXXXXXXXXXXXTXXXXXXXSAXXXXXXXXXXA

SEQ ID NO: 797188 - protein, 52 aa, unidentified
  VARIANT 2: note = Any amino acid
  VARIANT 3: note = Any amino acid
  VARIANT 4: note = Any amino acid
  VARIANT 5: note = Any amino acid
  VARIANT 6: note = Any amino acid
  VARIANT 7: note = Any amino acid
  VARIANT 8: note = Any amino acid
  VARIANT 9: note = Any amino acid
  VARIANT 10: note = Any amino acid
  VARIANT 11: note = Any amino acid
  VARIANT 12: note = Any amino acid
  VARIANT 13: note = Any amino acid
  VARIANT 14: note = Any amino acid
  VARIANT 15: note = Any amino acid
  VARIANT 16: note = Any amino acid
  VARIANT 17: note = Any amino acid
  VARIANT 18: note = Any amino acid
  VARIANT 19: note = Any amino acid
  VARIANT 20: note = Any amino acid
  VARIANT 21: note = Any amino acid
  VARIANT 22: note = Any amino acid
  VARIANT 23: note = Any amino acid
  VARIANT 24: note = Any amino acid
  VARIANT 25: note = Any amino acid
  VARIANT 26: note = Any amino acid
  VARIANT 27: note = Any amino acid
  VARIANT 28: note = Any amino acid
  VARIANT 29: note = Any amino acid
  VARIANT 30: note = Any amino acid
  VARIANT 32: note = Any amino acid
  VARIANT 33: note = Any amino acid
  VARIANT 34: note = Any amino acid
  VARIANT 35: note = Any amino acid
  VARIANT 36: note = Any amino acid
  VARIANT 37: note = Any amino acid
  VARIANT 38: note = Any amino acid
  VARIANT 41: note = Any amino acid
  VARIANT 42: note = Any amino acid
  VARIANT 43: note = Any amino acid
  VARIANT 44: note = Any amino acid
  VARIANT 45: note = Any amino acid
  VARIANT 46: note = Any amino acid
  VARIANT 47: note = Any amino acid
  VARIANT 48: note = Any amino acid
  VARIANT 49: note = Any amino acid
  VARIANT 50: note = Any amino acid
  VARIANT 51: note = Any amino acid
GXXXXXXXXXXXXXXXXXXXXXXXXXXXXXGXXXXXXXSSXXXXXXXXXXXG

SEQ ID NO: 797189 - protein, 52 aa, unidentified
  VARIANT 2: note = Any amino acid
  VARIANT 3: note = Any amino acid
  VARIANT 4: note = Any amino acid
  VARIANT 5: note = Any amino acid
  VARIANT 6: note = Any amino acid
  VARIANT 7: note = Any amino acid
  VARIANT 8: note = Any amino acid
  VARIANT 9: note = Any amino acid
  VARIANT 10: note = Any amino acid
  VARIANT 11: note = Any amino acid
  VARIANT 12: note = Any amino acid
  VARIANT 13: note = Any amino acid
  VARIANT 14: note = Any amino acid
  VARIANT 15: note = Any amino acid
  VARIANT 16: note = Any amino acid
  VARIANT 17: note = Any amino acid
  VARIANT 18: note = Any amino acid
  VARIANT 19: note = Any amino acid
  VARIANT 20: note = Any amino acid
  VARIANT 21: note = Any amino acid
  VARIANT 22: note = Any amino acid
  VARIANT 23: note = Any amino acid
  VARIANT 24: note = Any amino acid
  VARIANT 25: note = Any amino acid
  VARIANT 26: note = Any amino acid
  VARIANT 27: note = Any amino acid
  VARIANT 28: note = Any amino acid
  VARIANT 29: note = Any amino acid
  VARIANT 30: note = Any amino acid
  VARIANT 31: note = Any amino acid
  VARIANT 33: note = Any amino acid
  VARIANT 34: note = Any amino acid
  VARIANT 35: note = Any amino acid
  VARIANT 36: note = Any amino acid
  VARIANT 37: note = Any amino acid
  VARIANT 38: note = Any amino acid
  VARIANT 39: note = Any amino acid
  VARIANT 42: note = Any amino acid
  VARIANT 43: note = Any amino acid
  VARIANT 44: note = Any amino acid
  VARIANT 45: note = Any amino acid
  VARIANT 46: note = Any amino acid
  VARIANT 47: note = Any amino acid
  VARIANT 48: note = Any amino acid
  VARIANT 49: note = Any amino acid
  VARIANT 50: note = Any amino acid
  VARIANT 51: note = Any amino acid
GXXXXXXXXXXXXXXXXXXXXXXXXXXXXXXGXXXXXXXSAXXXXXXXXXXS

SEQ ID NO: 797190 - protein, 52 aa, unidentified
  VARIANT 2: note = Any amino acid
  VARIANT 3: note = Any amino acid
  VARIANT 4: note = Any amino acid
  VARIANT 5: note = Any amino acid
  VARIANT 6: note = Any amino acid
  VARIANT 7: note = Any amino acid
  VARIANT 8: note = Any amino acid
  VARIANT 9: note = Any amino acid
  VARIANT 10: note = Any amino acid
  VARIANT 11: note = Any amino acid
  VARIANT 12: note = Any amino acid
  VARIANT 13: note = Any amino acid
  VARIANT 14: note = Any amino acid
  VARIANT 15: note = Any amino acid
  VARIANT 16: note = Any amino acid
  VARIANT 17: note = Any amino acid
  VARIANT 18: note = Any amino acid
  VARIANT 19: note = Any amino acid
  VARIANT 20: note = Any amino acid
  VARIANT 21: note = Any amino acid
  VARIANT 22: note = Any amino acid
  VARIANT 23: note = Any amino acid
  VARIANT 24: note = Any amino acid
  VARIANT 25: note = Any amino acid
  VARIANT 26: note = Any amino acid
  VARIANT 27: note = Any amino acid
  VARIANT 28: note = Any amino acid
  VARIANT 29: note = Any amino acid
  VARIANT 30: note = Any amino acid
  VARIANT 31: note = Any amino acid
  VARIANT 33: note = Any amino acid
  VARIANT 34: note = Any amino acid
  VARIANT 35: note = Any amino acid
  VARIANT 36: note = Any amino acid
  VARIANT 37: note = Any amino acid
  VARIANT 38: note = Any amino acid
  VARIANT 39: note = Any amino acid
  VARIANT 42: note = Any amino acid
  VARIANT 43: note = Any amino acid
  VARIANT 44: note = Any amino acid
  VARIANT 45: note = Any amino acid
  VARIANT 46: note = Any amino acid
  VARIANT 47: note = Any amino acid
  VARIANT 48: note = Any amino acid
  VARIANT 49: note = Any amino acid
  VARIANT 50: note = Any amino acid
  VARIANT 51: note = Any amino acid
GXXXXXXXXXXXXXXXXXXXXXXXXXXXXXXRXXXXXXXTGXXXXXXXXXXG

SEQ ID NO: 797191 - protein, 53 aa, unidentified
  VARIANT 2: note = Any amino acid
  VARIANT 3: note = Any amino acid
  VARIANT 4: note = Any amino acid
  VARIANT 5: note = Any amino acid
  VARIANT 6: note = Any amino acid
  VARIANT 7: note = Any amino acid
  VARIANT 8: note = Any amino acid
  VARIANT 9: note = Any amino acid
  VARIANT 10: note = Any amino acid
  VARIANT 11: note = Any amino acid
  VARIANT 12: note = Any amino acid
  VARIANT 13: note = Any amino acid
  VARIANT 14: note = Any amino acid
  VARIANT 15: note = Any amino acid
  VARIANT 16: note = Any amino acid
  VARIANT 17: note = Any amino acid
  VARIANT 18: note = Any amino acid
  VARIANT 19: note = Any amino acid
  VARIANT 20: note = Any amino acid
  VARIANT 21: note = Any amino acid
  VARIANT 22: note = Any amino acid
  VARIANT 23: note = Any amino acid
  VARIANT 24: note = Any amino acid
  VARIANT 25: note = Any amino acid
  VARIANT 26: note = Any amino acid
  VARIANT 27: note = Any amino acid
  VARIANT 28: note = Any amino acid
  VARIANT 29: note = Any amino acid
  VARIANT 30: note = Any amino acid
  VARIANT 31: note = Any amino acid
  VARIANT 32: note = Any amino acid
  VARIANT 34: note = Any amino acid
  VARIANT 35: note = Any amino acid
  VARIANT 36: note = Any amino acid
  VARIANT 37: note = Any amino acid
  VARIANT 38: note = Any amino acid
  VARIANT 39: note = Any amino acid
  VARIANT 40: note = Any amino acid
  VARIANT 43: note = Any amino acid
  VARIANT 44: note = Any amino acid
  VARIANT 45: note = Any amino acid
  VARIANT 46: note = Any amino acid
  VARIANT 47: note = Any amino acid
  VARIANT 48: note = Any amino acid
  VARIANT 49: note = Any amino acid
  VARIANT 50: note = Any amino acid
  VARIANT 51: note = Any amino acid
  VARIANT 52: note = Any amino acid
GXXXXXXXXXXXXXXXXXXXXXXXXXXXXXXXGXXXXXXXTGXXXXXXXXXXV

SEQ ID NO: 797192 - protein, 50 aa, unidentified
  VARIANT 2: note = Any amino acid
  VARIANT 3: note = Any amino acid
  VARIANT 4: note = Any amino acid
  VARIANT 5: note = Any amino acid
  VARIANT 6: note = Any amino acid
  VARIANT 7: note = Any amino acid
  VARIANT 8: note = Any amino acid
  VARIANT 9: note = Any amino acid
  VARIANT 10: note = Any amino acid
  VARIANT 11: note = Any amino acid
  VARIANT 12: note = Any amino acid
  VARIANT 13: note = Any amino acid
  VARIANT 14: note = Any amino acid
  VARIANT 15: note = Any amino acid
  VARIANT 16: note = Any amino acid
  VARIANT 17: note = Any amino acid
  VARIANT 18: note = Any amino acid
  VARIANT 19: note = Any amino acid
  VARIANT 20: note = Any amino acid
  VARIANT 21: note = Any amino acid
  VARIANT 22: note = Any amino acid
  VARIANT 23: note = Any amino acid
  VARIANT 24: note = Any amino acid
  VARIANT 25: note = Any amino acid
  VARIANT 26: note = Any amino acid
  VARIANT 27: note = Any amino acid
  VARIANT 28: note = Any amino acid
  VARIANT 29: note = Any amino acid
  VARIANT 31: note = Any amino acid
  VARIANT 32: note = Any amino acid
  VARIANT 33: note = Any amino acid
  VARIANT 34: note = Any amino acid
  VARIANT 35: note = Any amino acid
  VARIANT 36: note = Any amino acid
  VARIANT 37: note = Any amino acid
  VARIANT 40: note = Any amino acid
  VARIANT 41: note = Any amino acid
  VARIANT 42: note = Any amino acid
  VARIANT 43: note = Any amino acid
  VARIANT 44: note = Any amino acid
  VARIANT 45: note = Any amino acid
  VARIANT 46: note = Any amino acid
  VARIANT 47: note = Any amino acid
  VARIANT 48: note = Any amino acid
  VARIANT 49: note = Any amino acid
GXXXXXXXXXXXXXXXXXXXXXXXXXXXXGXXXXXXXSGXXXXXXXXXXC

SEQ ID NO: 797193 - protein, 53 aa, unidentified
  VARIANT 2: note = Any amino acid
  VARIANT 3: note = Any amino acid
  VARIANT 4: note = Any amino acid
  VARIANT 5: note = Any amino acid
  VARIANT 6: note = Any amino acid
  VARIANT 7: note = Any amino acid
  VARIANT 8: note = Any amino acid
  VARIANT 9: note = Any amino acid
  VARIANT 10: note = Any amino acid
  VARIANT 11: note = Any amino acid
  VARIANT 12: note = Any amino acid
  VARIANT 13: note = Any amino acid
  VARIANT 14: note = Any amino acid
  VARIANT 15: note = Any amino acid
  VARIANT 16: note = Any amino acid
  VARIANT 17: note = Any amino acid
  VARIANT 18: note = Any amino acid
  VARIANT 19: note = Any amino acid
  VARIANT 20: note = Any amino acid
  VARIANT 21: note = Any amino acid
  VARIANT 22: note = Any amino acid
  VARIANT 23: note = Any amino acid
  VARIANT 24: note = Any amino acid
  VARIANT 25: note = Any amino acid
  VARIANT 26: note = Any amino acid
  VARIANT 27: note = Any amino acid
  VARIANT 28: note = Any amino acid
  VARIANT 29: note = Any amino acid
  VARIANT 30: note = Any amino acid
  VARIANT 32: note = Any amino acid
  VARIANT 33: note = Any amino acid
  VARIANT 34: note = Any amino acid
  VARIANT 35: note = Any amino acid
  VARIANT 36: note = Any amino acid
  VARIANT 37: note = Any amino acid
  VARIANT 38: note = Any amino acid
  VARIANT 41: note = Any amino acid
  VARIANT 42: note = Any amino acid
  VARIANT 43: note = Any amino acid
  VARIANT 44: note = Any amino acid
  VARIANT 45: note = Any amino acid
  VARIANT 46: note = Any amino acid
  VARIANT 47: note = Any amino acid
  VARIANT 48: note = Any amino acid
  VARIANT 49: note = Any amino acid
  VARIANT 50: note = Any amino acid
  VARIANT 51: note = Any amino acid
  VARIANT 52: note = Any amino acid
GXXXXXXXXXXXXXXXXXXXXXXXXXXXXXCXXXXXXXSGXXXXXXXXXXXXG

SEQ ID NO: 797194 - protein, 53 aa, unidentified
  VARIANT 2: note = Any amino acid
  VARIANT 3: note = Any amino acid
  VARIANT 4: note = Any amino acid
  VARIANT 5: note = Any amino acid
  VARIANT 6: note = Any amino acid
  VARIANT 7: note = Any amino acid
  VARIANT 8: note = Any amino acid
  VARIANT 9: note = Any amino acid
  VARIANT 10: note = Any amino acid
  VARIANT 11: note = Any amino acid
  VARIANT 12: note = Any amino acid
  VARIANT 13: note = Any amino acid
  VARIANT 14: note = Any amino acid
  VARIANT 15: note = Any amino acid
  VARIANT 16: note = Any amino acid
  VARIANT 17: note = Any amino acid
  VARIANT 18: note = Any amino acid
  VARIANT 19: note = Any amino acid
  VARIANT 20: note = Any amino acid
  VARIANT 21: note = Any amino acid
  VARIANT 22: note = Any amino acid
  VARIANT 23: note = Any amino acid
  VARIANT 24: note = Any amino acid
  VARIANT 25: note = Any amino acid
  VARIANT 26: note = Any amino acid
  VARIANT 27: note = Any amino acid
  VARIANT 28: note = Any amino acid
  VARIANT 29: note = Any amino acid
  VARIANT 30: note = Any amino acid
  VARIANT 31: note = Any amino acid
  VARIANT 33: note = Any amino acid
  VARIANT 34: note = Any amino acid
  VARIANT 35: note = Any amino acid
  VARIANT 36: note = Any amino acid
  VARIANT 37: note = Any amino acid
  VARIANT 38: note = Any amino acid
  VARIANT 39: note = Any amino acid
  VARIANT 42: note = Any amino acid
  VARIANT 43: note = Any amino acid
  VARIANT 44: note = Any amino acid
  VARIANT 45: note = Any amino acid
  VARIANT 46: note = Any amino acid
  VARIANT 47: note = Any amino acid
  VARIANT 48: note = Any amino acid
  VARIANT 49: note = Any amino acid
  VARIANT 50: note = Any amino acid
  VARIANT 51: note = Any amino acid
  VARIANT 52: note = Any amino acid
GXXXXXXXXXXXXXXXXXXXXXXXXXXXXXXRXXXXXXXSAXXXXXXXXXXXT

SEQ ID NO: 797195 - protein, 52 aa, unidentified
  VARIANT 2: note = Any amino acid
  VARIANT 3: note = Any amino acid
  VARIANT 4: note = Any amino acid
  VARIANT 5: note = Any amino acid
  VARIANT 6: note = Any amino acid
  VARIANT 7: note = Any amino acid
  VARIANT 8: note = Any amino acid
  VARIANT 9: note = Any amino acid
  VARIANT 10: note = Any amino acid
  VARIANT 11: note = Any amino acid
  VARIANT 12: note = Any amino acid
  VARIANT 13: note = Any amino acid
  VARIANT 14: note = Any amino acid
  VARIANT 15: note = Any amino acid
  VARIANT 16: note = Any amino acid
  VARIANT 17: note = Any amino acid
  VARIANT 18: note = Any amino acid
  VARIANT 19: note = Any amino acid
  VARIANT 20: note = Any amino acid
  VARIANT 21: note = Any amino acid
  VARIANT 22: note = Any amino acid
  VARIANT 23: note = Any amino acid
  VARIANT 24: note = Any amino acid
  VARIANT 25: note = Any amino acid
  VARIANT 26: note = Any amino acid
  VARIANT 27: note = Any amino acid
  VARIANT 28: note = Any amino acid
  VARIANT 29: note = Any amino acid
  VARIANT 30: note = Any amino acid
  VARIANT 32: note = Any amino acid
  VARIANT 33: note = Any amino acid
  VARIANT 34: note = Any amino acid
  VARIANT 35: note = Any amino acid
  VARIANT 36: note = Any amino acid
  VARIANT 37: note = Any amino acid
  VARIANT 38: note = Any amino acid
  VARIANT 41: note = Any amino acid
  VARIANT 42: note = Any amino acid
  VARIANT 43: note = Any amino acid
  VARIANT 44: note = Any amino acid
  VARIANT 45: note = Any amino acid
  VARIANT 46: note = Any amino acid
  VARIANT 47: note = Any amino acid
  VARIANT 48: note = Any amino acid
  VARIANT 49: note = Any amino acid
  VARIANT 50: note = Any amino acid
  VARIANT 51: note = Any amino acid
PXXXXXXXXXXXXXXXXXXXXXXXXXXXXXGXXXXXXXTGXXXXXXXXXXXG

SEQ ID NO: 797196 - protein, 53 aa, unidentified
  VARIANT 2: note = Any amino acid
  VARIANT 3: note = Any amino acid
  VARIANT 4: note = Any amino acid
  VARIANT 5: note = Any amino acid
  VARIANT 6: note = Any amino acid
  VARIANT 7: note = Any amino acid
  VARIANT 8: note = Any amino acid
  VARIANT 9: note = Any amino acid
  VARIANT 10: note = Any amino acid
  VARIANT 11: note = Any amino acid
  VARIANT 12: note = Any amino acid
  VARIANT 13: note = Any amino acid
  VARIANT 14: note = Any amino acid
  VARIANT 15: note = Any amino acid
  VARIANT 16: note = Any amino acid
  VARIANT 17: note = Any amino acid
  VARIANT 18: note = Any amino acid
  VARIANT 19: note = Any amino acid
  VARIANT 20: note = Any amino acid
  VARIANT 21: note = Any amino acid
  VARIANT 22: note = Any amino acid
  VARIANT 23: note = Any amino acid
  VARIANT 24: note = Any amino acid
  VARIANT 25: note = Any amino acid
  VARIANT 26: note = Any amino acid
  VARIANT 27: note = Any amino acid
  VARIANT 28: note = Any amino acid
  VARIANT 29: note = Any amino acid
  VARIANT 30: note = Any amino acid
  VARIANT 31: note = Any amino acid
  VARIANT 33: note = Any amino acid
  VARIANT 34: note = Any amino acid
  VARIANT 35: note = Any amino acid
  VARIANT 36: note = Any amino acid
  VARIANT 37: note = Any amino acid
  VARIANT 38: note = Any amino acid
  VARIANT 39: note = Any amino acid
  VARIANT 42: note = Any amino acid
  VARIANT 43: note = Any amino acid
  VARIANT 44: note = Any amino acid
  VARIANT 45: note = Any amino acid
  VARIANT 46: note = Any amino acid
  VARIANT 47: note = Any amino acid
  VARIANT 48: note = Any amino acid
  VARIANT 49: note = Any amino acid
  VARIANT 50: note = Any amino acid
  VARIANT 51: note = Any amino acid
  VARIANT 52: note = Any amino acid
GXXXXXXXXXXXXXXXXXXXXXXXXXXXXXXGXXXXXXXTGXXXXXXXXXXXV

SEQ ID NO: 797197 - protein, 53 aa, unidentified
  VARIANT 2: note = Any amino acid
  VARIANT 3: note = Any amino acid
  VARIANT 4: note = Any amino acid
  VARIANT 5: note = Any amino acid
  VARIANT 6: note = Any amino acid
  VARIANT 7: note = Any amino acid
  VARIANT 8: note = Any amino acid
  VARIANT 9: note = Any amino acid
  VARIANT 10: note = Any amino acid
  VARIANT 11: note = Any amino acid
  VARIANT 12: note = Any amino acid
  VARIANT 13: note = Any amino acid
  VARIANT 14: note = Any amino acid
  VARIANT 15: note = Any amino acid
  VARIANT 16: note = Any amino acid
  VARIANT 17: note = Any amino acid
  VARIANT 18: note = Any amino acid
  VARIANT 19: note = Any amino acid
  VARIANT 20: note = Any amino acid
  VARIANT 21: note = Any amino acid
  VARIANT 22: note = Any amino acid
  VARIANT 23: note = Any amino acid
  VARIANT 24: note = Any amino acid
  VARIANT 25: note = Any amino acid
  VARIANT 26: note = Any amino acid
  VARIANT 27: note = Any amino acid
  VARIANT 28: note = Any amino acid
  VARIANT 29: note = Any amino acid
  VARIANT 30: note = Any amino acid
  VARIANT 31: note = Any amino acid
  VARIANT 32: note = Any amino acid
  VARIANT 34: note = Any amino acid
  VARIANT 35: note = Any amino acid
  VARIANT 36: note = Any amino acid
  VARIANT 37: note = Any amino acid
  VARIANT 38: note = Any amino acid
  VARIANT 39: note = Any amino acid
  VARIANT 40: note = Any amino acid
  VARIANT 43: note = Any amino acid
  VARIANT 44: note = Any amino acid
  VARIANT 45: note = Any amino acid
  VARIANT 46: note = Any amino acid
  VARIANT 47: note = Any amino acid
  VARIANT 48: note = Any amino acid
  VARIANT 49: note = Any amino acid
  VARIANT 50: note = Any amino acid
  VARIANT 51: note = Any amino acid
  VARIANT 52: note = Any amino acid
GXXXXXXXXXXXXXXXXXXXXXXXXXXXXXXXGXXXXXXXSGXXXXXXXXXXG

SEQ ID NO: 797198 - protein, 56 aa, unidentified
  VARIANT 2: note = Any amino acid
  VARIANT 3: note = Any amino acid
  VARIANT 4: note = Any amino acid
  VARIANT 5: note = Any amino acid
  VARIANT 6: note = Any amino acid
  VARIANT 7: note = Any amino acid
  VARIANT 8: note = Any amino acid
  VARIANT 9: note = Any amino acid
  VARIANT 10: note = Any amino acid
  VARIANT 11: note = Any amino acid
  VARIANT 12: note = Any amino acid
  VARIANT 13: note = Any amino acid
  VARIANT 14: note = Any amino acid
  VARIANT 15: note = Any amino acid
  VARIANT 16: note = Any amino acid
  VARIANT 17: note = Any amino acid
  VARIANT 18: note = Any amino acid
  VARIANT 19: note = Any amino acid
  VARIANT 20: note = Any amino acid
  VARIANT 21: note = Any amino acid
  VARIANT 22: note = Any amino acid
  VARIANT 23: note = Any amino acid
  VARIANT 24: note = Any amino acid
  VARIANT 25: note = Any amino acid
  VARIANT 26: note = Any amino acid
  VARIANT 27: note = Any amino acid
  VARIANT 28: note = Any amino acid
  VARIANT 29: note = Any amino acid
  VARIANT 30: note = Any amino acid
  VARIANT 32: note = Any amino acid
  VARIANT 33: note = Any amino acid
  VARIANT 34: note = Any amino acid
  VARIANT 35: note = Any amino acid
  VARIANT 36: note = Any amino acid
  VARIANT 37: note = Any amino acid
  VARIANT 38: note = Any amino acid
  VARIANT 41: note = Any amino acid
  VARIANT 42: note = Any amino acid
  VARIANT 43: note = Any amino acid
  VARIANT 44: note = Any amino acid
  VARIANT 45: note = Any amino acid
  VARIANT 46: note = Any amino acid
  VARIANT 47: note = Any amino acid
  VARIANT 48: note = Any amino acid
  VARIANT 49: note = Any amino acid
  VARIANT 50: note = Any amino acid
  VARIANT 51: note = Any amino acid
  VARIANT 52: note = Any amino acid
  VARIANT 53: note = Any amino acid
  VARIANT 54: note = Any amino acid
  VARIANT 55: note = Any amino acid
GXXXXXXXXXXXXXXXXXXXXXXXXXXXXXGXXXXXXXSGXXXXXXXXXXXXXXXG

SEQ ID NO: 797199 - protein, 52 aa, unidentified
  VARIANT 2: note = Any amino acid
  VARIANT 3: note = Any amino acid
  VARIANT 4: note = Any amino acid
  VARIANT 5: note = Any amino acid
  VARIANT 6: note = Any amino acid
  VARIANT 7: note = Any amino acid
  VARIANT 8: note = Any amino acid
  VARIANT 9: note = Any amino acid
  VARIANT 10: note = Any amino acid
  VARIANT 11: note = Any amino acid
  VARIANT 12: note = Any amino acid
  VARIANT 13: note = Any amino acid
  VARIANT 14: note = Any amino acid
  VARIANT 15: note = Any amino acid
  VARIANT 16: note = Any amino acid
  VARIANT 17: note = Any amino acid
  VARIANT 18: note = Any amino acid
  VARIANT 19: note = Any amino acid
  VARIANT 20: note = Any amino acid
  VARIANT 21: note = Any amino acid
  VARIANT 22: note = Any amino acid
  VARIANT 23: note = Any amino acid
  VARIANT 24: note = Any amino acid
  VARIANT 25: note = Any amino acid
  VARIANT 26: note = Any amino acid
  VARIANT 27: note = Any amino acid
  VARIANT 28: note = Any amino acid
  VARIANT 29: note = Any amino acid
  VARIANT 30: note = Any amino acid
  VARIANT 31: note = Any amino acid
  VARIANT 33: note = Any amino acid
  VARIANT 34: note = Any amino acid
  VARIANT 35: note = Any amino acid
  VARIANT 36: note = Any amino acid
  VARIANT 37: note = Any amino acid
  VARIANT 38: note = Any amino acid
  VARIANT 39: note = Any amino acid
  VARIANT 42: note = Any amino acid
  VARIANT 43: note = Any amino acid
  VARIANT 44: note = Any amino acid
  VARIANT 45: note = Any amino acid
  VARIANT 46: note = Any amino acid
  VARIANT 47: note = Any amino acid
  VARIANT 48: note = Any amino acid
  VARIANT 49: note = Any amino acid
  VARIANT 50: note = Any amino acid
  VARIANT 51: note = Any amino acid
GXXXXXXXXXXXXXXXXXXXXXXXXXXXXXXTXXXXXXXSAXXXXXXXXXXG

SEQ ID NO: 797200 - protein, 52 aa, unidentified
  VARIANT 2: note = Any amino acid
  VARIANT 3: note = Any amino acid
  VARIANT 4: note = Any amino acid
  VARIANT 5: note = Any amino acid
  VARIANT 6: note = Any amino acid
  VARIANT 7: note = Any amino acid
  VARIANT 8: note = Any amino acid
  VARIANT 9: note = Any amino acid
  VARIANT 10: note = Any amino acid
  VARIANT 11: note = Any amino acid
  VARIANT 12: note = Any amino acid
  VARIANT 13: note = Any amino acid
  VARIANT 14: note = Any amino acid
  VARIANT 15: note = Any amino acid
  VARIANT 16: note = Any amino acid
  VARIANT 17: note = Any amino acid
  VARIANT 18: note = Any amino acid
  VARIANT 19: note = Any amino acid
  VARIANT 20: note = Any amino acid
  VARIANT 21: note = Any amino acid
  VARIANT 22: note = Any amino acid
  VARIANT 23: note = Any amino acid
  VARIANT 24: note = Any amino acid
  VARIANT 25: note = Any amino acid
  VARIANT 26: note = Any amino acid
  VARIANT 27: note = Any amino acid
  VARIANT 28: note = Any amino acid
  VARIANT 29: note = Any amino acid
  VARIANT 30: note = Any amino acid
  VARIANT 31: note = Any amino acid
  VARIANT 33: note = Any amino acid
  VARIANT 34: note = Any amino acid
  VARIANT 35: note = Any amino acid
  VARIANT 36: note = Any amino acid
  VARIANT 37: note = Any amino acid
  VARIANT 38: note = Any amino acid
  VARIANT 39: note = Any amino acid
  VARIANT 42: note = Any amino acid
  VARIANT 43: note = Any amino acid
  VARIANT 44: note = Any amino acid
  VARIANT 45: note = Any amino acid
  VARIANT 46: note = Any amino acid
  VARIANT 47: note = Any amino acid
  VARIANT 48: note = Any amino acid
  VARIANT 49: note = Any amino acid
  VARIANT 50: note = Any amino acid
  VARIANT 51: note = Any amino acid
CXXXXXXXXXXXXXXXXXXXXXXXXXXXXXXGXXXXXXXSGXXXXXXXXXXG

SEQ ID NO: 797201 - protein, 52 aa, unidentified
  VARIANT 2: note = Any amino acid
  VARIANT 3: note = Any amino acid
  VARIANT 4: note = Any amino acid
  VARIANT 5: note = Any amino acid
  VARIANT 6: note = Any amino acid
  VARIANT 7: note = Any amino acid
  VARIANT 8: note = Any amino acid
  VARIANT 9: note = Any amino acid
  VARIANT 10: note = Any amino acid
  VARIANT 11: note = Any amino acid
  VARIANT 12: note = Any amino acid
  VARIANT 13: note = Any amino acid
  VARIANT 14: note = Any amino acid
  VARIANT 15: note = Any amino acid
  VARIANT 16: note = Any amino acid
  VARIANT 17: note = Any amino acid
  VARIANT 18: note = Any amino acid
  VARIANT 19: note = Any amino acid
  VARIANT 20: note = Any amino acid
  VARIANT 21: note = Any amino acid
  VARIANT 22: note = Any amino acid
  VARIANT 23: note = Any amino acid
  VARIANT 24: note = Any amino acid
  VARIANT 25: note = Any amino acid
  VARIANT 26: note = Any amino acid
  VARIANT 27: note = Any amino acid
  VARIANT 28: note = Any amino acid
  VARIANT 29: note = Any amino acid
  VARIANT 30: note = Any amino acid
  VARIANT 31: note = Any amino acid
  VARIANT 33: note = Any amino acid
  VARIANT 34: note = Any amino acid
  VARIANT 35: note = Any amino acid
  VARIANT 36: note = Any amino acid
  VARIANT 37: note = Any amino acid
  VARIANT 38: note = Any amino acid
  VARIANT 39: note = Any amino acid
  VARIANT 42: note = Any amino acid
  VARIANT 43: note = Any amino acid
  VARIANT 44: note = Any amino acid
  VARIANT 45: note = Any amino acid
  VARIANT 46: note = Any amino acid
  VARIANT 47: note = Any amino acid
  VARIANT 48: note = Any amino acid
  VARIANT 49: note = Any amino acid
  VARIANT 50: note = Any amino acid
  VARIANT 51: note = Any amino acid
GXXXXXXXXXXXXXXXXXXXXXXXXXXXXXXGXXXXXXXSGXXXXXXXXXXN

SEQ ID NO: 797202 - protein, 54 aa, unidentified
  VARIANT 2: note = Any amino acid
  VARIANT 3: note = Any amino acid
  VARIANT 4: note = Any amino acid
  VARIANT 5: note = Any amino acid
  VARIANT 6: note = Any amino acid
  VARIANT 7: note = Any amino acid
  VARIANT 8: note = Any amino acid
  VARIANT 9: note = Any amino acid
  VARIANT 10: note = Any amino acid
  VARIANT 11: note = Any amino acid
  VARIANT 12: note = Any amino acid
  VARIANT 13: note = Any amino acid
  VARIANT 14: note = Any amino acid
  VARIANT 15: note = Any amino acid
  VARIANT 16: note = Any amino acid
  VARIANT 17: note = Any amino acid
  VARIANT 18: note = Any amino acid
  VARIANT 19: note = Any amino acid
  VARIANT 20: note = Any amino acid
  VARIANT 21: note = Any amino acid
  VARIANT 22: note = Any amino acid
  VARIANT 23: note = Any amino acid
  VARIANT 24: note = Any amino acid
  VARIANT 25: note = Any amino acid
  VARIANT 26: note = Any amino acid
  VARIANT 27: note = Any amino acid
  VARIANT 28: note = Any amino acid
  VARIANT 29: note = Any amino acid
  VARIANT 30: note = Any amino acid
  VARIANT 31: note = Any amino acid
  VARIANT 32: note = Any amino acid
  VARIANT 34: note = Any amino acid
  VARIANT 35: note = Any amino acid
  VARIANT 36: note = Any amino acid
  VARIANT 37: note = Any amino acid
  VARIANT 38: note = Any amino acid
  VARIANT 39: note = Any amino acid
  VARIANT 40: note = Any amino acid
  VARIANT 43: note = Any amino acid
  VARIANT 44: note = Any amino acid
  VARIANT 45: note = Any amino acid
  VARIANT 46: note = Any amino acid
  VARIANT 47: note = Any amino acid
  VARIANT 48: note = Any amino acid
  VARIANT 49: note = Any amino acid
  VARIANT 50: note = Any amino acid
  VARIANT 51: note = Any amino acid
  VARIANT 52: note = Any amino acid
  VARIANT 53: note = Any amino acid
GXXXXXXXXXXXXXXXXXXXXXXXXXXXXXXXNXXXXXXXTGXXXXXXXXXXXK

SEQ ID NO: 797203 - protein, 53 aa, unidentified
  VARIANT 2: note = Any amino acid
  VARIANT 3: note = Any amino acid
  VARIANT 4: note = Any amino acid
  VARIANT 5: note = Any amino acid
  VARIANT 6: note = Any amino acid
  VARIANT 7: note = Any amino acid
  VARIANT 8: note = Any amino acid
  VARIANT 9: note = Any amino acid
  VARIANT 10: note = Any amino acid
  VARIANT 11: note = Any amino acid
  VARIANT 12: note = Any amino acid
  VARIANT 13: note = Any amino acid
  VARIANT 14: note = Any amino acid
  VARIANT 15: note = Any amino acid
  VARIANT 16: note = Any amino acid
  VARIANT 17: note = Any amino acid
  VARIANT 18: note = Any amino acid
  VARIANT 19: note = Any amino acid
  VARIANT 20: note = Any amino acid
  VARIANT 21: note = Any amino acid
  VARIANT 22: note = Any amino acid
  VARIANT 23: note = Any amino acid
  VARIANT 24: note = Any amino acid
  VARIANT 25: note = Any amino acid
  VARIANT 26: note = Any amino acid
  VARIANT 27: note = Any amino acid
  VARIANT 28: note = Any amino acid
  VARIANT 29: note = Any amino acid
  VARIANT 30: note = Any amino acid
  VARIANT 31: note = Any amino acid
  VARIANT 33: note = Any amino acid
  VARIANT 34: note = Any amino acid
  VARIANT 35: note = Any amino acid
  VARIANT 36: note = Any amino acid
  VARIANT 37: note = Any amino acid
  VARIANT 38: note = Any amino acid
  VARIANT 39: note = Any amino acid
  VARIANT 42: note = Any amino acid
  VARIANT 43: note = Any amino acid
  VARIANT 44: note = Any amino acid
  VARIANT 45: note = Any amino acid
  VARIANT 46: note = Any amino acid
  VARIANT 47: note = Any amino acid
  VARIANT 48: note = Any amino acid
  VARIANT 49: note = Any amino acid
  VARIANT 50: note = Any amino acid
  VARIANT 51: note = Any amino acid
  VARIANT 52: note = Any amino acid
GXXXXXXXXXXXXXXXXXXXXXXXXXXXXXXGXXXXXXXSGXXXXXXXXXXXR

SEQ ID NO: 797204 - protein, 52 aa, unidentified
  VARIANT 2: note = Any amino acid
  VARIANT 3: note = Any amino acid
  VARIANT 4: note = Any amino acid
  VARIANT 5: note = Any amino acid
  VARIANT 6: note = Any amino acid
  VARIANT 7: note = Any amino acid
  VARIANT 8: note = Any amino acid
  VARIANT 9: note = Any amino acid
  VARIANT 10: note = Any amino acid
  VARIANT 11: note = Any amino acid
  VARIANT 12: note = Any amino acid
  VARIANT 13: note = Any amino acid
  VARIANT 14: note = Any amino acid
  VARIANT 15: note = Any amino acid
  VARIANT 16: note = Any amino acid
  VARIANT 17: note = Any amino acid
  VARIANT 18: note = Any amino acid
  VARIANT 19: note = Any amino acid
  VARIANT 20: note = Any amino acid
  VARIANT 21: note = Any amino acid
  VARIANT 22: note = Any amino acid
  VARIANT 23: note = Any amino acid
  VARIANT 24: note = Any amino acid
  VARIANT 25: note = Any amino acid
  VARIANT 26: note = Any amino acid
  VARIANT 27: note = Any amino acid
  VARIANT 28: note = Any amino acid
  VARIANT 29: note = Any amino acid
  VARIANT 30: note = Any amino acid
  VARIANT 31: note = Any amino acid
  VARIANT 33: note = Any amino acid
  VARIANT 34: note = Any amino acid
  VARIANT 35: note = Any amino acid
  VARIANT 36: note = Any amino acid
  VARIANT 37: note = Any amino acid
  VARIANT 38: note = Any amino acid
  VARIANT 39: note = Any amino acid
  VARIANT 42: note = Any amino acid
  VARIANT 43: note = Any amino acid
  VARIANT 44: note = Any amino acid
  VARIANT 45: note = Any amino acid
  VARIANT 46: note = Any amino acid
  VARIANT 47: note = Any amino acid
  VARIANT 48: note = Any amino acid
  VARIANT 49: note = Any amino acid
  VARIANT 50: note = Any amino acid
  VARIANT 51: note = Any amino acid
GXXXXXXXXXXXXXXXXXXXXXXXXXXXXXXGXXXXXXXTGXXXXXXXXXXC

SEQ ID NO: 797205 - protein, 52 aa, unidentified
  VARIANT 2: note = Any amino acid
  VARIANT 3: note = Any amino acid
  VARIANT 4: note = Any amino acid
  VARIANT 5: note = Any amino acid
  VARIANT 6: note = Any amino acid
  VARIANT 7: note = Any amino acid
  VARIANT 8: note = Any amino acid
  VARIANT 9: note = Any amino acid
  VARIANT 10: note = Any amino acid
  VARIANT 11: note = Any amino acid
  VARIANT 12: note = Any amino acid
  VARIANT 13: note = Any amino acid
  VARIANT 14: note = Any amino acid
  VARIANT 15: note = Any amino acid
  VARIANT 16: note = Any amino acid
  VARIANT 17: note = Any amino acid
  VARIANT 18: note = Any amino acid
  VARIANT 19: note = Any amino acid
  VARIANT 20: note = Any amino acid
  VARIANT 21: note = Any amino acid
  VARIANT 22: note = Any amino acid
  VARIANT 23: note = Any amino acid
  VARIANT 24: note = Any amino acid
  VARIANT 25: note = Any amino acid
  VARIANT 26: note = Any amino acid
  VARIANT 27: note = Any amino acid
  VARIANT 28: note = Any amino acid
  VARIANT 29: note = Any amino acid
  VARIANT 30: note = Any amino acid
  VARIANT 31: note = Any amino acid
  VARIANT 33: note = Any amino acid
  VARIANT 34: note = Any amino acid
  VARIANT 35: note = Any amino acid
  VARIANT 36: note = Any amino acid
  VARIANT 37: note = Any amino acid
  VARIANT 38: note = Any amino acid
  VARIANT 39: note = Any amino acid
  VARIANT 42: note = Any amino acid
  VARIANT 43: note = Any amino acid
  VARIANT 44: note = Any amino acid
  VARIANT 45: note = Any amino acid
  VARIANT 46: note = Any amino acid
  VARIANT 47: note = Any amino acid
  VARIANT 48: note = Any amino acid
  VARIANT 49: note = Any amino acid
  VARIANT 50: note = Any amino acid
  VARIANT 51: note = Any amino acid
GXXXXXXXXXXXXXXXXXXXXXXXXXXXXXXSXXXXXXXSGXXXXXXXXXXS

SEQ ID NO: 797206 - protein, 54 aa, unidentified
  VARIANT 2: note = Any amino acid
  VARIANT 3: note = Any amino acid
  VARIANT 4: note = Any amino acid
  VARIANT 5: note = Any amino acid
  VARIANT 6: note = Any amino acid
  VARIANT 7: note = Any amino acid
  VARIANT 8: note = Any amino acid
  VARIANT 9: note = Any amino acid
  VARIANT 10: note = Any amino acid
  VARIANT 11: note = Any amino acid
  VARIANT 12: note = Any amino acid
  VARIANT 13: note = Any amino acid
  VARIANT 14: note = Any amino acid
  VARIANT 15: note = Any amino acid
  VARIANT 16: note = Any amino acid
  VARIANT 17: note = Any amino acid
  VARIANT 18: note = Any amino acid
  VARIANT 19: note = Any amino acid
  VARIANT 20: note = Any amino acid
  VARIANT 21: note = Any amino acid
  VARIANT 22: note = Any amino acid
  VARIANT 23: note = Any amino acid
  VARIANT 24: note = Any amino acid
  VARIANT 25: note = Any amino acid
  VARIANT 26: note = Any amino acid
  VARIANT 27: note = Any amino acid
  VARIANT 28: note = Any amino acid
  VARIANT 29: note = Any amino acid
  VARIANT 30: note = Any amino acid
  VARIANT 31: note = Any amino acid
  VARIANT 32: note = Any amino acid
  VARIANT 33: note = Any amino acid
  VARIANT 35: note = Any amino acid
  VARIANT 36: note = Any amino acid
  VARIANT 37: note = Any amino acid
  VARIANT 38: note = Any amino acid
  VARIANT 39: note = Any amino acid
  VARIANT 40: note = Any amino acid
  VARIANT 41: note = Any amino acid
  VARIANT 44: note = Any amino acid
  VARIANT 45: note = Any amino acid
  VARIANT 46: note = Any amino acid
  VARIANT 47: note = Any amino acid
  VARIANT 48: note = Any amino acid
  VARIANT 49: note = Any amino acid
  VARIANT 50: note = Any amino acid
  VARIANT 51: note = Any amino acid
  VARIANT 52: note = Any amino acid
  VARIANT 53: note = Any amino acid
GXXXXXXXXXXXXXXXXXXXXXXXXXXXXXXXXGXXXXXXXSGXXXXXXXXXXA

SEQ ID NO: 797207 - protein, 52 aa, unidentified
  VARIANT 2: note = Any amino acid
  VARIANT 3: note = Any amino acid
  VARIANT 4: note = Any amino acid
  VARIANT 5: note = Any amino acid
  VARIANT 6: note = Any amino acid
  VARIANT 7: note = Any amino acid
  VARIANT 8: note = Any amino acid
  VARIANT 9: note = Any amino acid
  VARIANT 10: note = Any amino acid
  VARIANT 11: note = Any amino acid
  VARIANT 12: note = Any amino acid
  VARIANT 13: note = Any amino acid
  VARIANT 14: note = Any amino acid
  VARIANT 15: note = Any amino acid
  VARIANT 16: note = Any amino acid
  VARIANT 17: note = Any amino acid
  VARIANT 18: note = Any amino acid
  VARIANT 19: note = Any amino acid
  VARIANT 20: note = Any amino acid
  VARIANT 21: note = Any amino acid
  VARIANT 22: note = Any amino acid
  VARIANT 23: note = Any amino acid
  VARIANT 24: note = Any amino acid
  VARIANT 25: note = Any amino acid
  VARIANT 26: note = Any amino acid
  VARIANT 27: note = Any amino acid
  VARIANT 28: note = Any amino acid
  VARIANT 29: note = Any amino acid
  VARIANT 30: note = Any amino acid
  VARIANT 31: note = Any amino acid
  VARIANT 33: note = Any amino acid
  VARIANT 34: note = Any amino acid
  VARIANT 35: note = Any amino acid
  VARIANT 36: note = Any amino acid
  VARIANT 37: note = Any amino acid
  VARIANT 38: note = Any amino acid
  VARIANT 39: note = Any amino acid
  VARIANT 42: note = Any amino acid
  VARIANT 43: note = Any amino acid
  VARIANT 44: note = Any amino acid
  VARIANT 45: note = Any amino acid
  VARIANT 46: note = Any amino acid
  VARIANT 47: note = Any amino acid
  VARIANT 48: note = Any amino acid
  VARIANT 49: note = Any amino acid
  VARIANT 50: note = Any amino acid
  VARIANT 51: note = Any amino acid
AXXXXXXXXXXXXXXXXXXXXXXXXXXXXXXGXXXXXXXSGXXXXXXXXXXC

SEQ ID NO: 797208 - protein, 52 aa, unidentified
  VARIANT 2: note = Any amino acid
  VARIANT 3: note = Any amino acid
  VARIANT 4: note = Any amino acid
  VARIANT 5: note = Any amino acid
  VARIANT 6: note = Any amino acid
  VARIANT 7: note = Any amino acid
  VARIANT 8: note = Any amino acid
  VARIANT 9: note = Any amino acid
  VARIANT 10: note = Any amino acid
  VARIANT 11: note = Any amino acid
  VARIANT 12: note = Any amino acid
  VARIANT 13: note = Any amino acid
  VARIANT 14: note = Any amino acid
  VARIANT 15: note = Any amino acid
  VARIANT 16: note = Any amino acid
  VARIANT 17: note = Any amino acid
  VARIANT 18: note = Any amino acid
  VARIANT 19: note = Any amino acid
  VARIANT 20: note = Any amino acid
  VARIANT 21: note = Any amino acid
  VARIANT 22: note = Any amino acid
  VARIANT 23: note = Any amino acid
  VARIANT 24: note = Any amino acid
  VARIANT 25: note = Any amino acid
  VARIANT 26: note = Any amino acid
  VARIANT 27: note = Any amino acid
  VARIANT 28: note = Any amino acid
  VARIANT 29: note = Any amino acid
  VARIANT 30: note = Any amino acid
  VARIANT 32: note = Any amino acid
  VARIANT 33: note = Any amino acid
  VARIANT 34: note = Any amino acid
  VARIANT 35: note = Any amino acid
  VARIANT 36: note = Any amino acid
  VARIANT 37: note = Any amino acid
  VARIANT 38: note = Any amino acid
  VARIANT 41: note = Any amino acid
  VARIANT 42: note = Any amino acid
  VARIANT 43: note = Any amino acid
  VARIANT 44: note = Any amino acid
  VARIANT 45: note = Any amino acid
  VARIANT 46: note = Any amino acid
  VARIANT 47: note = Any amino acid
  VARIANT 48: note = Any amino acid
  VARIANT 49: note = Any amino acid
  VARIANT 50: note = Any amino acid
  VARIANT 51: note = Any amino acid
GXXXXXXXXXXXXXXXXXXXXXXXXXXXXXGXXXXXXXSDXXXXXXXXXXXA

SEQ ID NO: 797209 - protein, 52 aa, unidentified
  VARIANT 2: note = Any amino acid
  VARIANT 3: note = Any amino acid
  VARIANT 4: note = Any amino acid
  VARIANT 5: note = Any amino acid
  VARIANT 6: note = Any amino acid
  VARIANT 7: note = Any amino acid
  VARIANT 8: note = Any amino acid
  VARIANT 9: note = Any amino acid
  VARIANT 10: note = Any amino acid
  VARIANT 11: note = Any amino acid
  VARIANT 12: note = Any amino acid
  VARIANT 13: note = Any amino acid
  VARIANT 14: note = Any amino acid
  VARIANT 15: note = Any amino acid
  VARIANT 16: note = Any amino acid
  VARIANT 17: note = Any amino acid
  VARIANT 18: note = Any amino acid
  VARIANT 19: note = Any amino acid
  VARIANT 20: note = Any amino acid
  VARIANT 21: note = Any amino acid
  VARIANT 22: note = Any amino acid
  VARIANT 23: note = Any amino acid
  VARIANT 24: note = Any amino acid
  VARIANT 25: note = Any amino acid
  VARIANT 26: note = Any amino acid
  VARIANT 27: note = Any amino acid
  VARIANT 28: note = Any amino acid
  VARIANT 29: note = Any amino acid
  VARIANT 30: note = Any amino acid
  VARIANT 31: note = Any amino acid
  VARIANT 33: note = Any amino acid
  VARIANT 34: note = Any amino acid
  VARIANT 35: note = Any amino acid
  VARIANT 36: note = Any amino acid
  VARIANT 37: note = Any amino acid
  VARIANT 38: note = Any amino acid
  VARIANT 39: note = Any amino acid
  VARIANT 42: note = Any amino acid
  VARIANT 43: note = Any amino acid
  VARIANT 44: note = Any amino acid
  VARIANT 45: note = Any amino acid
  VARIANT 46: note = Any amino acid
  VARIANT 47: note = Any amino acid
  VARIANT 48: note = Any amino acid
  VARIANT 49: note = Any amino acid
  VARIANT 50: note = Any amino acid
  VARIANT 51: note = Any amino acid
GXXXXXXXXXXXXXXXXXXXXXXXXXXXXXXNXXXXXXXSGXXXXXXXXXXT

SEQ ID NO: 797210 - protein, 55 aa, unidentified
  VARIANT 2: note = Any amino acid
  VARIANT 3: note = Any amino acid
  VARIANT 4: note = Any amino acid
  VARIANT 5: note = Any amino acid
  VARIANT 6: note = Any amino acid
  VARIANT 7: note = Any amino acid
  VARIANT 8: note = Any amino acid
  VARIANT 9: note = Any amino acid
  VARIANT 10: note = Any amino acid
  VARIANT 11: note = Any amino acid
  VARIANT 12: note = Any amino acid
  VARIANT 13: note = Any amino acid
  VARIANT 14: note = Any amino acid
  VARIANT 15: note = Any amino acid
  VARIANT 16: note = Any amino acid
  VARIANT 17: note = Any amino acid
  VARIANT 18: note = Any amino acid
  VARIANT 19: note = Any amino acid
  VARIANT 20: note = Any amino acid
  VARIANT 21: note = Any amino acid
  VARIANT 22: note = Any amino acid
  VARIANT 23: note = Any amino acid
  VARIANT 24: note = Any amino acid
  VARIANT 25: note = Any amino acid
  VARIANT 26: note = Any amino acid
  VARIANT 27: note = Any amino acid
  VARIANT 28: note = Any amino acid
  VARIANT 29: note = Any amino acid
  VARIANT 30: note = Any amino acid
  VARIANT 31: note = Any amino acid
  VARIANT 32: note = Any amino acid
  VARIANT 34: note = Any amino acid
  VARIANT 35: note = Any amino acid
  VARIANT 36: note = Any amino acid
  VARIANT 37: note = Any amino acid
  VARIANT 38: note = Any amino acid
  VARIANT 39: note = Any amino acid
  VARIANT 40: note = Any amino acid
  VARIANT 43: note = Any amino acid
  VARIANT 44: note = Any amino acid
  VARIANT 45: note = Any amino acid
  VARIANT 46: note = Any amino acid
  VARIANT 47: note = Any amino acid
  VARIANT 48: note = Any amino acid
  VARIANT 49: note = Any amino acid
  VARIANT 50: note = Any amino acid
  VARIANT 51: note = Any amino acid
  VARIANT 52: note = Any amino acid
  VARIANT 53: note = Any amino acid
  VARIANT 54: note = Any amino acid
GXXXXXXXXXXXXXXXXXXXXXXXXXXXXXXXGXXXXXXXSGXXXXXXXXXXXXG

SEQ ID NO: 797211 - protein, 51 aa, unidentified
  VARIANT 2: note = Any amino acid
  VARIANT 3: note = Any amino acid
  VARIANT 4: note = Any amino acid
  VARIANT 5: note = Any amino acid
  VARIANT 6: note = Any amino acid
  VARIANT 7: note = Any amino acid
  VARIANT 8: note = Any amino acid
  VARIANT 9: note = Any amino acid
  VARIANT 10: note = Any amino acid
  VARIANT 11: note = Any amino acid
  VARIANT 12: note = Any amino acid
  VARIANT 13: note = Any amino acid
  VARIANT 14: note = Any amino acid
  VARIANT 15: note = Any amino acid
  VARIANT 16: note = Any amino acid
  VARIANT 17: note = Any amino acid
  VARIANT 18: note = Any amino acid
  VARIANT 19: note = Any amino acid
  VARIANT 20: note = Any amino acid
  VARIANT 21: note = Any amino acid
  VARIANT 22: note = Any amino acid
  VARIANT 23: note = Any amino acid
  VARIANT 24: note = Any amino acid
  VARIANT 25: note = Any amino acid
  VARIANT 26: note = Any amino acid
  VARIANT 27: note = Any amino acid
  VARIANT 28: note = Any amino acid
  VARIANT 29: note = Any amino acid
  VARIANT 30: note = Any amino acid
  VARIANT 32: note = Any amino acid
  VARIANT 33: note = Any amino acid
  VARIANT 34: note = Any amino acid
  VARIANT 35: note = Any amino acid
  VARIANT 36: note = Any amino acid
  VARIANT 37: note = Any amino acid
  VARIANT 38: note = Any amino acid
  VARIANT 41: note = Any amino acid
  VARIANT 42: note = Any amino acid
  VARIANT 43: note = Any amino acid
  VARIANT 44: note = Any amino acid
  VARIANT 45: note = Any amino acid
  VARIANT 46: note = Any amino acid
  VARIANT 47: note = Any amino acid
  VARIANT 48: note = Any amino acid
  VARIANT 49: note = Any amino acid
  VARIANT 50: note = Any amino acid
GXXXXXXXXXXXXXXXXXXXXXXXXXXXXXGXXXXXXXSGXXXXXXXXXXI

SEQ ID NO: 797212 - protein, 52 aa, unidentified
  VARIANT 2: note = Any amino acid
  VARIANT 3: note = Any amino acid
  VARIANT 4: note = Any amino acid
  VARIANT 5: note = Any amino acid
  VARIANT 6: note = Any amino acid
  VARIANT 7: note = Any amino acid
  VARIANT 8: note = Any amino acid
  VARIANT 9: note = Any amino acid
  VARIANT 10: note = Any amino acid
  VARIANT 11: note = Any amino acid
  VARIANT 12: note = Any amino acid
  VARIANT 13: note = Any amino acid
  VARIANT 14: note = Any amino acid
  VARIANT 15: note = Any amino acid
  VARIANT 16: note = Any amino acid
  VARIANT 17: note = Any amino acid
  VARIANT 18: note = Any amino acid
  VARIANT 19: note = Any amino acid
  VARIANT 20: note = Any amino acid
  VARIANT 21: note = Any amino acid
  VARIANT 22: note = Any amino acid
  VARIANT 23: note = Any amino acid
  VARIANT 24: note = Any amino acid
  VARIANT 25: note = Any amino acid
  VARIANT 26: note = Any amino acid
  VARIANT 27: note = Any amino acid
  VARIANT 28: note = Any amino acid
  VARIANT 29: note = Any amino acid
  VARIANT 30: note = Any amino acid
  VARIANT 31: note = Any amino acid
  VARIANT 33: note = Any amino acid
  VARIANT 34: note = Any amino acid
  VARIANT 35: note = Any amino acid
  VARIANT 36: note = Any amino acid
  VARIANT 37: note = Any amino acid
  VARIANT 38: note = Any amino acid
  VARIANT 39: note = Any amino acid
  VARIANT 42: note = Any amino acid
  VARIANT 43: note = Any amino acid
  VARIANT 44: note = Any amino acid
  VARIANT 45: note = Any amino acid
  VARIANT 46: note = Any amino acid
  VARIANT 47: note = Any amino acid
  VARIANT 48: note = Any amino acid
  VARIANT 49: note = Any amino acid
  VARIANT 50: note = Any amino acid
  VARIANT 51: note = Any amino acid
GXXXXXXXXXXXXXXXXXXXXXXXXXXXXXXRXXXXXXXSGXXXXXXXXXXT

SEQ ID NO: 797213 - protein, 52 aa, unidentified
  VARIANT 2: note = Any amino acid
  VARIANT 3: note = Any amino acid
  VARIANT 4: note = Any amino acid
  VARIANT 5: note = Any amino acid
  VARIANT 6: note = Any amino acid
  VARIANT 7: note = Any amino acid
  VARIANT 8: note = Any amino acid
  VARIANT 9: note = Any amino acid
  VARIANT 10: note = Any amino acid
  VARIANT 11: note = Any amino acid
  VARIANT 12: note = Any amino acid
  VARIANT 13: note = Any amino acid
  VARIANT 14: note = Any amino acid
  VARIANT 15: note = Any amino acid
  VARIANT 16: note = Any amino acid
  VARIANT 17: note = Any amino acid
  VARIANT 18: note = Any amino acid
  VARIANT 19: note = Any amino acid
  VARIANT 20: note = Any amino acid
  VARIANT 21: note = Any amino acid
  VARIANT 22: note = Any amino acid
  VARIANT 23: note = Any amino acid
  VARIANT 24: note = Any amino acid
  VARIANT 25: note = Any amino acid
  VARIANT 26: note = Any amino acid
  VARIANT 27: note = Any amino acid
  VARIANT 28: note = Any amino acid
  VARIANT 29: note = Any amino acid
  VARIANT 30: note = Any amino acid
  VARIANT 31: note = Any amino acid
  VARIANT 33: note = Any amino acid
  VARIANT 34: note = Any amino acid
  VARIANT 35: note = Any amino acid
  VARIANT 36: note = Any amino acid
  VARIANT 37: note = Any amino acid
  VARIANT 38: note = Any amino acid
  VARIANT 39: note = Any amino acid
  VARIANT 42: note = Any amino acid
  VARIANT 43: note = Any amino acid
  VARIANT 44: note = Any amino acid
  VARIANT 45: note = Any amino acid
  VARIANT 46: note = Any amino acid
  VARIANT 47: note = Any amino acid
  VARIANT 48: note = Any amino acid
  VARIANT 49: note = Any amino acid
  VARIANT 50: note = Any amino acid
  VARIANT 51: note = Any amino acid
GXXXXXXXXXXXXXXXXXXXXXXXXXXXXXXTXXXXXXXSGXXXXXXXXXXG

SEQ ID NO: 797214 - protein, 52 aa, unidentified
  VARIANT 2: note = Any amino acid
  VARIANT 3: note = Any amino acid
  VARIANT 4: note = Any amino acid
  VARIANT 5: note = Any amino acid
  VARIANT 6: note = Any amino acid
  VARIANT 7: note = Any amino acid
  VARIANT 8: note = Any amino acid
  VARIANT 9: note = Any amino acid
  VARIANT 10: note = Any amino acid
  VARIANT 11: note = Any amino acid
  VARIANT 12: note = Any amino acid
  VARIANT 13: note = Any amino acid
  VARIANT 14: note = Any amino acid
  VARIANT 15: note = Any amino acid
  VARIANT 16: note = Any amino acid
  VARIANT 17: note = Any amino acid
  VARIANT 18: note = Any amino acid
  VARIANT 19: note = Any amino acid
  VARIANT 20: note = Any amino acid
  VARIANT 21: note = Any amino acid
  VARIANT 22: note = Any amino acid
  VARIANT 23: note = Any amino acid
  VARIANT 24: note = Any amino acid
  VARIANT 25: note = Any amino acid
  VARIANT 26: note = Any amino acid
  VARIANT 27: note = Any amino acid
  VARIANT 28: note = Any amino acid
  VARIANT 29: note = Any amino acid
  VARIANT 30: note = Any amino acid
  VARIANT 31: note = Any amino acid
  VARIANT 33: note = Any amino acid
  VARIANT 34: note = Any amino acid
  VARIANT 35: note = Any amino acid
  VARIANT 36: note = Any amino acid
  VARIANT 37: note = Any amino acid
  VARIANT 38: note = Any amino acid
  VARIANT 39: note = Any amino acid
  VARIANT 42: note = Any amino acid
  VARIANT 43: note = Any amino acid
  VARIANT 44: note = Any amino acid
  VARIANT 45: note = Any amino acid
  VARIANT 46: note = Any amino acid
  VARIANT 47: note = Any amino acid
  VARIANT 48: note = Any amino acid
  VARIANT 49: note = Any amino acid
  VARIANT 50: note = Any amino acid
  VARIANT 51: note = Any amino acid
GXXXXXXXXXXXXXXXXXXXXXXXXXXXXXXAXXXXXXXSGXXXXXXXXXXT

SEQ ID NO: 797215 - protein, 52 aa, unidentified
  VARIANT 2: note = Any amino acid
  VARIANT 3: note = Any amino acid
  VARIANT 4: note = Any amino acid
  VARIANT 5: note = Any amino acid
  VARIANT 6: note = Any amino acid
  VARIANT 7: note = Any amino acid
  VARIANT 8: note = Any amino acid
  VARIANT 9: note = Any amino acid
  VARIANT 10: note = Any amino acid
  VARIANT 11: note = Any amino acid
  VARIANT 12: note = Any amino acid
  VARIANT 13: note = Any amino acid
  VARIANT 14: note = Any amino acid
  VARIANT 15: note = Any amino acid
  VARIANT 16: note = Any amino acid
  VARIANT 17: note = Any amino acid
  VARIANT 18: note = Any amino acid
  VARIANT 19: note = Any amino acid
  VARIANT 20: note = Any amino acid
  VARIANT 21: note = Any amino acid
  VARIANT 22: note = Any amino acid
  VARIANT 23: note = Any amino acid
  VARIANT 24: note = Any amino acid
  VARIANT 25: note = Any amino acid
  VARIANT 26: note = Any amino acid
  VARIANT 27: note = Any amino acid
  VARIANT 28: note = Any amino acid
  VARIANT 29: note = Any amino acid
  VARIANT 30: note = Any amino acid
  VARIANT 31: note = Any amino acid
  VARIANT 33: note = Any amino acid
  VARIANT 34: note = Any amino acid
  VARIANT 35: note = Any amino acid
  VARIANT 36: note = Any amino acid
  VARIANT 37: note = Any amino acid
  VARIANT 38: note = Any amino acid
  VARIANT 39: note = Any amino acid
  VARIANT 42: note = Any amino acid
  VARIANT 43: note = Any amino acid
  VARIANT 44: note = Any amino acid
  VARIANT 45: note = Any amino acid
  VARIANT 46: note = Any amino acid
  VARIANT 47: note = Any amino acid
  VARIANT 48: note = Any amino acid
  VARIANT 49: note = Any amino acid
  VARIANT 50: note = Any amino acid
  VARIANT 51: note = Any amino acid
GXXXXXXXXXXXXXXXXXXXXXXXXXXXXXXGXXXXXXXRAXXXXXXXXXXG

SEQ ID NO: 797216 - protein, 55 aa, unidentified
  VARIANT 2: note = Any amino acid
  VARIANT 3: note = Any amino acid
  VARIANT 4: note = Any amino acid
  VARIANT 5: note = Any amino acid
  VARIANT 6: note = Any amino acid
  VARIANT 7: note = Any amino acid
  VARIANT 8: note = Any amino acid
  VARIANT 9: note = Any amino acid
  VARIANT 10: note = Any amino acid
  VARIANT 11: note = Any amino acid
  VARIANT 12: note = Any amino acid
  VARIANT 13: note = Any amino acid
  VARIANT 14: note = Any amino acid
  VARIANT 15: note = Any amino acid
  VARIANT 16: note = Any amino acid
  VARIANT 17: note = Any amino acid
  VARIANT 18: note = Any amino acid
  VARIANT 19: note = Any amino acid
  VARIANT 20: note = Any amino acid
  VARIANT 21: note = Any amino acid
  VARIANT 22: note = Any amino acid
  VARIANT 23: note = Any amino acid
  VARIANT 24: note = Any amino acid
  VARIANT 25: note = Any amino acid
  VARIANT 26: note = Any amino acid
  VARIANT 27: note = Any amino acid
  VARIANT 28: note = Any amino acid
  VARIANT 29: note = Any amino acid
  VARIANT 30: note = Any amino acid
  VARIANT 31: note = Any amino acid
  VARIANT 32: note = Any amino acid
  VARIANT 33: note = Any amino acid
  VARIANT 34: note = Any amino acid
  VARIANT 36: note = Any amino acid
  VARIANT 37: note = Any amino acid
  VARIANT 38: note = Any amino acid
  VARIANT 39: note = Any amino acid
  VARIANT 40: note = Any amino acid
  VARIANT 41: note = Any amino acid
  VARIANT 42: note = Any amino acid
  VARIANT 45: note = Any amino acid
  VARIANT 46: note = Any amino acid
  VARIANT 47: note = Any amino acid
  VARIANT 48: note = Any amino acid
  VARIANT 49: note = Any amino acid
  VARIANT 50: note = Any amino acid
  VARIANT 51: note = Any amino acid
  VARIANT 52: note = Any amino acid
  VARIANT 53: note = Any amino acid
  VARIANT 54: note = Any amino acid
GXXXXXXXXXXXXXXXXXXXXXXXXXXXXXXXXXGXXXXXXXSGXXXXXXXXXXV

SEQ ID NO: 797217 - protein, 53 aa, unidentified
  VARIANT 2: note = Any amino acid
  VARIANT 3: note = Any amino acid
  VARIANT 4: note = Any amino acid
  VARIANT 5: note = Any amino acid
  VARIANT 6: note = Any amino acid
  VARIANT 7: note = Any amino acid
  VARIANT 8: note = Any amino acid
  VARIANT 9: note = Any amino acid
  VARIANT 10: note = Any amino acid
  VARIANT 11: note = Any amino acid
  VARIANT 12: note = Any amino acid
  VARIANT 13: note = Any amino acid
  VARIANT 14: note = Any amino acid
  VARIANT 15: note = Any amino acid
  VARIANT 16: note = Any amino acid
  VARIANT 17: note = Any amino acid
  VARIANT 18: note = Any amino acid
  VARIANT 19: note = Any amino acid
  VARIANT 20: note = Any amino acid
  VARIANT 21: note = Any amino acid
  VARIANT 22: note = Any amino acid
  VARIANT 23: note = Any amino acid
  VARIANT 24: note = Any amino acid
  VARIANT 25: note = Any amino acid
  VARIANT 26: note = Any amino acid
  VARIANT 27: note = Any amino acid
  VARIANT 28: note = Any amino acid
  VARIANT 29: note = Any amino acid
  VARIANT 30: note = Any amino acid
  VARIANT 32: note = Any amino acid
  VARIANT 33: note = Any amino acid
  VARIANT 34: note = Any amino acid
  VARIANT 35: note = Any amino acid
  VARIANT 36: note = Any amino acid
  VARIANT 37: note = Any amino acid
  VARIANT 38: note = Any amino acid
  VARIANT 41: note = Any amino acid
  VARIANT 42: note = Any amino acid
  VARIANT 43: note = Any amino acid
  VARIANT 44: note = Any amino acid
  VARIANT 45: note = Any amino acid
  VARIANT 46: note = Any amino acid
  VARIANT 47: note = Any amino acid
  VARIANT 48: note = Any amino acid
  VARIANT 49: note = Any amino acid
  VARIANT 50: note = Any amino acid
  VARIANT 51: note = Any amino acid
  VARIANT 52: note = Any amino acid
AXXXXXXXXXXXXXXXXXXXXXXXXXXXXXGXXXXXXXSGXXXXXXXXXXXXA

SEQ ID NO: 797218 - protein, 51 aa, unidentified
  VARIANT 2: note = Any amino acid
  VARIANT 3: note = Any amino acid
  VARIANT 4: note = Any amino acid
  VARIANT 5: note = Any amino acid
  VARIANT 6: note = Any amino acid
  VARIANT 7: note = Any amino acid
  VARIANT 8: note = Any amino acid
  VARIANT 9: note = Any amino acid
  VARIANT 10: note = Any amino acid
  VARIANT 11: note = Any amino acid
  VARIANT 12: note = Any amino acid
  VARIANT 13: note = Any amino acid
  VARIANT 14: note = Any amino acid
  VARIANT 15: note = Any amino acid
  VARIANT 16: note = Any amino acid
  VARIANT 17: note = Any amino acid
  VARIANT 18: note = Any amino acid
  VARIANT 19: note = Any amino acid
  VARIANT 20: note = Any amino acid
  VARIANT 21: note = Any amino acid
  VARIANT 22: note = Any amino acid
  VARIANT 23: note = Any amino acid
  VARIANT 24: note = Any amino acid
  VARIANT 25: note = Any amino acid
  VARIANT 26: note = Any amino acid
  VARIANT 27: note = Any amino acid
  VARIANT 28: note = Any amino acid
  VARIANT 29: note = Any amino acid
  VARIANT 30: note = Any amino acid
  VARIANT 32: note = Any amino acid
  VARIANT 33: note = Any amino acid
  VARIANT 34: note = Any amino acid
  VARIANT 35: note = Any amino acid
  VARIANT 36: note = Any amino acid
  VARIANT 37: note = Any amino acid
  VARIANT 38: note = Any amino acid
  VARIANT 41: note = Any amino acid
  VARIANT 42: note = Any amino acid
  VARIANT 43: note = Any amino acid
  VARIANT 44: note = Any amino acid
  VARIANT 45: note = Any amino acid
  VARIANT 46: note = Any amino acid
  VARIANT 47: note = Any amino acid
  VARIANT 48: note = Any amino acid
  VARIANT 49: note = Any amino acid
  VARIANT 50: note = Any amino acid
YXXXXXXXXXXXXXXXXXXXXXXXXXXXXXGXXXXXXXSQXXXXXXXXXXG

SEQ ID NO: 797219 - protein, 52 aa, unidentified
  VARIANT 2: note = Any amino acid
  VARIANT 3: note = Any amino acid
  VARIANT 4: note = Any amino acid
  VARIANT 5: note = Any amino acid
  VARIANT 6: note = Any amino acid
  VARIANT 7: note = Any amino acid
  VARIANT 8: note = Any amino acid
  VARIANT 9: note = Any amino acid
  VARIANT 10: note = Any amino acid
  VARIANT 11: note = Any amino acid
  VARIANT 12: note = Any amino acid
  VARIANT 13: note = Any amino acid
  VARIANT 14: note = Any amino acid
  VARIANT 15: note = Any amino acid
  VARIANT 16: note = Any amino acid
  VARIANT 17: note = Any amino acid
  VARIANT 18: note = Any amino acid
  VARIANT 19: note = Any amino acid
  VARIANT 20: note = Any amino acid
  VARIANT 21: note = Any amino acid
  VARIANT 22: note = Any amino acid
  VARIANT 23: note = Any amino acid
  VARIANT 24: note = Any amino acid
  VARIANT 25: note = Any amino acid
  VARIANT 26: note = Any amino acid
  VARIANT 27: note = Any amino acid
  VARIANT 28: note = Any amino acid
  VARIANT 29: note = Any amino acid
  VARIANT 30: note = Any amino acid
  VARIANT 32: note = Any amino acid
  VARIANT 33: note = Any amino acid
  VARIANT 34: note = Any amino acid
  VARIANT 35: note = Any amino acid
  VARIANT 36: note = Any amino acid
  VARIANT 37: note = Any amino acid
  VARIANT 38: note = Any amino acid
  VARIANT 41: note = Any amino acid
  VARIANT 42: note = Any amino acid
  VARIANT 43: note = Any amino acid
  VARIANT 44: note = Any amino acid
  VARIANT 45: note = Any amino acid
  VARIANT 46: note = Any amino acid
  VARIANT 47: note = Any amino acid
  VARIANT 48: note = Any amino acid
  VARIANT 49: note = Any amino acid
  VARIANT 50: note = Any amino acid
  VARIANT 51: note = Any amino acid
GXXXXXXXXXXXXXXXXXXXXXXXXXXXXXGXXXXXXXSAXXXXXXXXXXXS

SEQ ID NO: 797220 - protein, 51 aa, unidentified
  VARIANT 2: note = Any amino acid
  VARIANT 3: note = Any amino acid
  VARIANT 4: note = Any amino acid
  VARIANT 5: note = Any amino acid
  VARIANT 6: note = Any amino acid
  VARIANT 7: note = Any amino acid
  VARIANT 8: note = Any amino acid
  VARIANT 9: note = Any amino acid
  VARIANT 10: note = Any amino acid
  VARIANT 11: note = Any amino acid
  VARIANT 12: note = Any amino acid
  VARIANT 13: note = Any amino acid
  VARIANT 14: note = Any amino acid
  VARIANT 15: note = Any amino acid
  VARIANT 16: note = Any amino acid
  VARIANT 17: note = Any amino acid
  VARIANT 18: note = Any amino acid
  VARIANT 19: note = Any amino acid
  VARIANT 20: note = Any amino acid
  VARIANT 21: note = Any amino acid
  VARIANT 22: note = Any amino acid
  VARIANT 23: note = Any amino acid
  VARIANT 24: note = Any amino acid
  VARIANT 25: note = Any amino acid
  VARIANT 26: note = Any amino acid
  VARIANT 27: note = Any amino acid
  VARIANT 28: note = Any amino acid
  VARIANT 29: note = Any amino acid
  VARIANT 30: note = Any amino acid
  VARIANT 32: note = Any amino acid
  VARIANT 33: note = Any amino acid
  VARIANT 34: note = Any amino acid
  VARIANT 35: note = Any amino acid
  VARIANT 36: note = Any amino acid
  VARIANT 37: note = Any amino acid
  VARIANT 38: note = Any amino acid
  VARIANT 41: note = Any amino acid
  VARIANT 42: note = Any amino acid
  VARIANT 43: note = Any amino acid
  VARIANT 44: note = Any amino acid
  VARIANT 45: note = Any amino acid
  VARIANT 46: note = Any amino acid
  VARIANT 47: note = Any amino acid
  VARIANT 48: note = Any amino acid
  VARIANT 49: note = Any amino acid
  VARIANT 50: note = Any amino acid
GXXXXXXXXXXXXXXXXXXXXXXXXXXXXXGXXXXXXXSGXXXXXXXXXXT

SEQ ID NO: 797221 - protein, 54 aa, unidentified
  VARIANT 2: note = Any amino acid
  VARIANT 3: note = Any amino acid
  VARIANT 4: note = Any amino acid
  VARIANT 5: note = Any amino acid
  VARIANT 6: note = Any amino acid
  VARIANT 7: note = Any amino acid
  VARIANT 8: note = Any amino acid
  VARIANT 9: note = Any amino acid
  VARIANT 10: note = Any amino acid
  VARIANT 11: note = Any amino acid
  VARIANT 12: note = Any amino acid
  VARIANT 13: note = Any amino acid
  VARIANT 14: note = Any amino acid
  VARIANT 15: note = Any amino acid
  VARIANT 16: note = Any amino acid
  VARIANT 17: note = Any amino acid
  VARIANT 18: note = Any amino acid
  VARIANT 19: note = Any amino acid
  VARIANT 20: note = Any amino acid
  VARIANT 21: note = Any amino acid
  VARIANT 22: note = Any amino acid
  VARIANT 23: note = Any amino acid
  VARIANT 24: note = Any amino acid
  VARIANT 25: note = Any amino acid
  VARIANT 26: note = Any amino acid
  VARIANT 27: note = Any amino acid
  VARIANT 28: note = Any amino acid
  VARIANT 29: note = Any amino acid
  VARIANT 30: note = Any amino acid
  VARIANT 31: note = Any amino acid
  VARIANT 32: note = Any amino acid
  VARIANT 34: note = Any amino acid
  VARIANT 35: note = Any amino acid
  VARIANT 36: note = Any amino acid
  VARIANT 37: note = Any amino acid
  VARIANT 38: note = Any amino acid
  VARIANT 39: note = Any amino acid
  VARIANT 40: note = Any amino acid
  VARIANT 43: note = Any amino acid
  VARIANT 44: note = Any amino acid
  VARIANT 45: note = Any amino acid
  VARIANT 46: note = Any amino acid
  VARIANT 47: note = Any amino acid
  VARIANT 48: note = Any amino acid
  VARIANT 49: note = Any amino acid
  VARIANT 50: note = Any amino acid
  VARIANT 51: note = Any amino acid
  VARIANT 52: note = Any amino acid
  VARIANT 53: note = Any amino acid
GXXXXXXXXXXXXXXXXXXXXXXXXXXXXXXXGXXXXXXXSGXXXXXXXXXXXY

SEQ ID NO: 797222 - protein, 53 aa, unidentified
  VARIANT 2: note = Any amino acid
  VARIANT 3: note = Any amino acid
  VARIANT 4: note = Any amino acid
  VARIANT 5: note = Any amino acid
  VARIANT 6: note = Any amino acid
  VARIANT 7: note = Any amino acid
  VARIANT 8: note = Any amino acid
  VARIANT 9: note = Any amino acid
  VARIANT 10: note = Any amino acid
  VARIANT 11: note = Any amino acid
  VARIANT 12: note = Any amino acid
  VARIANT 13: note = Any amino acid
  VARIANT 14: note = Any amino acid
  VARIANT 15: note = Any amino acid
  VARIANT 16: note = Any amino acid
  VARIANT 17: note = Any amino acid
  VARIANT 18: note = Any amino acid
  VARIANT 19: note = Any amino acid
  VARIANT 20: note = Any amino acid
  VARIANT 21: note = Any amino acid
  VARIANT 22: note = Any amino acid
  VARIANT 23: note = Any amino acid
  VARIANT 24: note = Any amino acid
  VARIANT 25: note = Any amino acid
  VARIANT 26: note = Any amino acid
  VARIANT 27: note = Any amino acid
  VARIANT 28: note = Any amino acid
  VARIANT 29: note = Any amino acid
  VARIANT 30: note = Any amino acid
  VARIANT 32: note = Any amino acid
  VARIANT 33: note = Any amino acid
  VARIANT 34: note = Any amino acid
  VARIANT 35: note = Any amino acid
  VARIANT 36: note = Any amino acid
  VARIANT 37: note = Any amino acid
  VARIANT 38: note = Any amino acid
  VARIANT 41: note = Any amino acid
  VARIANT 42: note = Any amino acid
  VARIANT 43: note = Any amino acid
  VARIANT 44: note = Any amino acid
  VARIANT 45: note = Any amino acid
  VARIANT 46: note = Any amino acid
  VARIANT 47: note = Any amino acid
  VARIANT 48: note = Any amino acid
  VARIANT 49: note = Any amino acid
  VARIANT 50: note = Any amino acid
  VARIANT 51: note = Any amino acid
  VARIANT 52: note = Any amino acid
GXXXXXXXXXXXXXXXXXXXXXXXXXXXXXGXXXXXXXSDXXXXXXXXXXXXR

SEQ ID NO: 797223 - protein, 52 aa, unidentified
  VARIANT 2: note = Any amino acid
  VARIANT 3: note = Any amino acid
  VARIANT 4: note = Any amino acid
  VARIANT 5: note = Any amino acid
  VARIANT 6: note = Any amino acid
  VARIANT 7: note = Any amino acid
  VARIANT 8: note = Any amino acid
  VARIANT 9: note = Any amino acid
  VARIANT 10: note = Any amino acid
  VARIANT 11: note = Any amino acid
  VARIANT 12: note = Any amino acid
  VARIANT 13: note = Any amino acid
  VARIANT 14: note = Any amino acid
  VARIANT 15: note = Any amino acid
  VARIANT 16: note = Any amino acid
  VARIANT 17: note = Any amino acid
  VARIANT 18: note = Any amino acid
  VARIANT 19: note = Any amino acid
  VARIANT 20: note = Any amino acid
  VARIANT 21: note = Any amino acid
  VARIANT 22: note = Any amino acid
  VARIANT 23: note = Any amino acid
  VARIANT 24: note = Any amino acid
  VARIANT 25: note = Any amino acid
  VARIANT 26: note = Any amino acid
  VARIANT 27: note = Any amino acid
  VARIANT 28: note = Any amino acid
  VARIANT 29: note = Any amino acid
  VARIANT 30: note = Any amino acid
  VARIANT 31: note = Any amino acid
  VARIANT 33: note = Any amino acid
  VARIANT 34: note = Any amino acid
  VARIANT 35: note = Any amino acid
  VARIANT 36: note = Any amino acid
  VARIANT 37: note = Any amino acid
  VARIANT 38: note = Any amino acid
  VARIANT 39: note = Any amino acid
  VARIANT 42: note = Any amino acid
  VARIANT 43: note = Any amino acid
  VARIANT 44: note = Any amino acid
  VARIANT 45: note = Any amino acid
  VARIANT 46: note = Any amino acid
  VARIANT 47: note = Any amino acid
  VARIANT 48: note = Any amino acid
  VARIANT 49: note = Any amino acid
  VARIANT 50: note = Any amino acid
  VARIANT 51: note = Any amino acid
QXXXXXXXXXXXXXXXXXXXXXXXXXXXXXXGXXXXXXXSGXXXXXXXXXXG

SEQ ID NO: 797224 - protein, 52 aa, unidentified
  VARIANT 2: note = Any amino acid
  VARIANT 3: note = Any amino acid
  VARIANT 4: note = Any amino acid
  VARIANT 5: note = Any amino acid
  VARIANT 6: note = Any amino acid
  VARIANT 7: note = Any amino acid
  VARIANT 8: note = Any amino acid
  VARIANT 9: note = Any amino acid
  VARIANT 10: note = Any amino acid
  VARIANT 11: note = Any amino acid
  VARIANT 12: note = Any amino acid
  VARIANT 13: note = Any amino acid
  VARIANT 14: note = Any amino acid
  VARIANT 15: note = Any amino acid
  VARIANT 16: note = Any amino acid
  VARIANT 17: note = Any amino acid
  VARIANT 18: note = Any amino acid
  VARIANT 19: note = Any amino acid
  VARIANT 20: note = Any amino acid
  VARIANT 21: note = Any amino acid
  VARIANT 22: note = Any amino acid
  VARIANT 23: note = Any amino acid
  VARIANT 24: note = Any amino acid
  VARIANT 25: note = Any amino acid
  VARIANT 26: note = Any amino acid
  VARIANT 27: note = Any amino acid
  VARIANT 28: note = Any amino acid
  VARIANT 29: note = Any amino acid
  VARIANT 30: note = Any amino acid
  VARIANT 31: note = Any amino acid
  VARIANT 33: note = Any amino acid
  VARIANT 34: note = Any amino acid
  VARIANT 35: note = Any amino acid
  VARIANT 36: note = Any amino acid
  VARIANT 37: note = Any amino acid
  VARIANT 38: note = Any amino acid
  VARIANT 39: note = Any amino acid
  VARIANT 42: note = Any amino acid
  VARIANT 43: note = Any amino acid
  VARIANT 44: note = Any amino acid
  VARIANT 45: note = Any amino acid
  VARIANT 46: note = Any amino acid
  VARIANT 47: note = Any amino acid
  VARIANT 48: note = Any amino acid
  VARIANT 49: note = Any amino acid
  VARIANT 50: note = Any amino acid
  VARIANT 51: note = Any amino acid
RXXXXXXXXXXXXXXXXXXXXXXXXXXXXXXGXXXXXXXSGXXXXXXXXXXT

SEQ ID NO: 797225 - protein, 52 aa, unidentified
  VARIANT 2: note = Any amino acid
  VARIANT 3: note = Any amino acid
  VARIANT 4: note = Any amino acid
  VARIANT 5: note = Any amino acid
  VARIANT 6: note = Any amino acid
  VARIANT 7: note = Any amino acid
  VARIANT 8: note = Any amino acid
  VARIANT 9: note = Any amino acid
  VARIANT 10: note = Any amino acid
  VARIANT 11: note = Any amino acid
  VARIANT 12: note = Any amino acid
  VARIANT 13: note = Any amino acid
  VARIANT 14: note = Any amino acid
  VARIANT 15: note = Any amino acid
  VARIANT 16: note = Any amino acid
  VARIANT 17: note = Any amino acid
  VARIANT 18: note = Any amino acid
  VARIANT 19: note = Any amino acid
  VARIANT 20: note = Any amino acid
  VARIANT 21: note = Any amino acid
  VARIANT 22: note = Any amino acid
  VARIANT 23: note = Any amino acid
  VARIANT 24: note = Any amino acid
  VARIANT 25: note = Any amino acid
  VARIANT 26: note = Any amino acid
  VARIANT 27: note = Any amino acid
  VARIANT 28: note = Any amino acid
  VARIANT 29: note = Any amino acid
  VARIANT 30: note = Any amino acid
  VARIANT 32: note = Any amino acid
  VARIANT 33: note = Any amino acid
  VARIANT 34: note = Any amino acid
  VARIANT 35: note = Any amino acid
  VARIANT 36: note = Any amino acid
  VARIANT 37: note = Any amino acid
  VARIANT 38: note = Any amino acid
  VARIANT 41: note = Any amino acid
  VARIANT 42: note = Any amino acid
  VARIANT 43: note = Any amino acid
  VARIANT 44: note = Any amino acid
  VARIANT 45: note = Any amino acid
  VARIANT 46: note = Any amino acid
  VARIANT 47: note = Any amino acid
  VARIANT 48: note = Any amino acid
  VARIANT 49: note = Any amino acid
  VARIANT 50: note = Any amino acid
  VARIANT 51: note = Any amino acid
GXXXXXXXXXXXXXXXXXXXXXXXXXXXXXGXXXXXXXSGXXXXXXXXXXXT

SEQ ID NO: 797226 - protein, 53 aa, unidentified
  VARIANT 2: note = Any amino acid
  VARIANT 3: note = Any amino acid
  VARIANT 4: note = Any amino acid
  VARIANT 5: note = Any amino acid
  VARIANT 6: note = Any amino acid
  VARIANT 7: note = Any amino acid
  VARIANT 8: note = Any amino acid
  VARIANT 9: note = Any amino acid
  VARIANT 10: note = Any amino acid
  VARIANT 11: note = Any amino acid
  VARIANT 12: note = Any amino acid
  VARIANT 13: note = Any amino acid
  VARIANT 14: note = Any amino acid
  VARIANT 15: note = Any amino acid
  VARIANT 16: note = Any amino acid
  VARIANT 17: note = Any amino acid
  VARIANT 18: note = Any amino acid
  VARIANT 19: note = Any amino acid
  VARIANT 20: note = Any amino acid
  VARIANT 21: note = Any amino acid
  VARIANT 22: note = Any amino acid
  VARIANT 23: note = Any amino acid
  VARIANT 24: note = Any amino acid
  VARIANT 25: note = Any amino acid
  VARIANT 26: note = Any amino acid
  VARIANT 27: note = Any amino acid
  VARIANT 28: note = Any amino acid
  VARIANT 29: note = Any amino acid
  VARIANT 30: note = Any amino acid
  VARIANT 31: note = Any amino acid
  VARIANT 33: note = Any amino acid
  VARIANT 34: note = Any amino acid
  VARIANT 35: note = Any amino acid
  VARIANT 36: note = Any amino acid
  VARIANT 37: note = Any amino acid
  VARIANT 38: note = Any amino acid
  VARIANT 39: note = Any amino acid
  VARIANT 42: note = Any amino acid
  VARIANT 43: note = Any amino acid
  VARIANT 44: note = Any amino acid
  VARIANT 45: note = Any amino acid
  VARIANT 46: note = Any amino acid
  VARIANT 47: note = Any amino acid
  VARIANT 48: note = Any amino acid
  VARIANT 49: note = Any amino acid
  VARIANT 50: note = Any amino acid
  VARIANT 51: note = Any amino acid
  VARIANT 52: note = Any amino acid
GXXXXXXXXXXXXXXXXXXXXXXXXXXXXXXGXXXXXXXSGXXXXXXXXXXXF

SEQ ID NO: 797227 - protein, 52 aa, unidentified
  VARIANT 2: note = Any amino acid
  VARIANT 3: note = Any amino acid
  VARIANT 4: note = Any amino acid
  VARIANT 5: note = Any amino acid
  VARIANT 6: note = Any amino acid
  VARIANT 7: note = Any amino acid
  VARIANT 8: note = Any amino acid
  VARIANT 9: note = Any amino acid
  VARIANT 10: note = Any amino acid
  VARIANT 11: note = Any amino acid
  VARIANT 12: note = Any amino acid
  VARIANT 13: note = Any amino acid
  VARIANT 14: note = Any amino acid
  VARIANT 15: note = Any amino acid
  VARIANT 16: note = Any amino acid
  VARIANT 17: note = Any amino acid
  VARIANT 18: note = Any amino acid
  VARIANT 19: note = Any amino acid
  VARIANT 20: note = Any amino acid
  VARIANT 21: note = Any amino acid
  VARIANT 22: note = Any amino acid
  VARIANT 23: note = Any amino acid
  VARIANT 24: note = Any amino acid
  VARIANT 25: note = Any amino acid
  VARIANT 26: note = Any amino acid
  VARIANT 27: note = Any amino acid
  VARIANT 28: note = Any amino acid
  VARIANT 29: note = Any amino acid
  VARIANT 30: note = Any amino acid
  VARIANT 31: note = Any amino acid
  VARIANT 33: note = Any amino acid
  VARIANT 34: note = Any amino acid
  VARIANT 35: note = Any amino acid
  VARIANT 36: note = Any amino acid
  VARIANT 37: note = Any amino acid
  VARIANT 38: note = Any amino acid
  VARIANT 39: note = Any amino acid
  VARIANT 42: note = Any amino acid
  VARIANT 43: note = Any amino acid
  VARIANT 44: note = Any amino acid
  VARIANT 45: note = Any amino acid
  VARIANT 46: note = Any amino acid
  VARIANT 47: note = Any amino acid
  VARIANT 48: note = Any amino acid
  VARIANT 49: note = Any amino acid
  VARIANT 50: note = Any amino acid
  VARIANT 51: note = Any amino acid
SXXXXXXXXXXXXXXXXXXXXXXXXXXXXXXGXXXXXXXSGXXXXXXXXXXG

SEQ ID NO: 797228 - protein, 49 aa, unidentified
  VARIANT 2: note = Any amino acid
  VARIANT 3: note = Any amino acid
  VARIANT 4: note = Any amino acid
  VARIANT 5: note = Any amino acid
  VARIANT 6: note = Any amino acid
  VARIANT 7: note = Any amino acid
  VARIANT 8: note = Any amino acid
  VARIANT 9: note = Any amino acid
  VARIANT 10: note = Any amino acid
  VARIANT 11: note = Any amino acid
  VARIANT 12: note = Any amino acid
  VARIANT 13: note = Any amino acid
  VARIANT 14: note = Any amino acid
  VARIANT 15: note = Any amino acid
  VARIANT 16: note = Any amino acid
  VARIANT 17: note = Any amino acid
  VARIANT 18: note = Any amino acid
  VARIANT 19: note = Any amino acid
  VARIANT 20: note = Any amino acid
  VARIANT 21: note = Any amino acid
  VARIANT 22: note = Any amino acid
  VARIANT 23: note = Any amino acid
  VARIANT 24: note = Any amino acid
  VARIANT 25: note = Any amino acid
  VARIANT 26: note = Any amino acid
  VARIANT 27: note = Any amino acid
  VARIANT 29: note = Any amino acid
  VARIANT 30: note = Any amino acid
  VARIANT 31: note = Any amino acid
  VARIANT 32: note = Any amino acid
  VARIANT 33: note = Any amino acid
  VARIANT 34: note = Any amino acid
  VARIANT 35: note = Any amino acid
  VARIANT 38: note = Any amino acid
  VARIANT 39: note = Any amino acid
  VARIANT 40: note = Any amino acid
  VARIANT 41: note = Any amino acid
  VARIANT 42: note = Any amino acid
  VARIANT 43: note = Any amino acid
  VARIANT 44: note = Any amino acid
  VARIANT 45: note = Any amino acid
  VARIANT 46: note = Any amino acid
  VARIANT 47: note = Any amino acid
  VARIANT 48: note = Any amino acid
GXXXXXXXXXXXXXXXXXXXXXXXXXXGXXXXXXXSGXXXXXXXXXXXG

SEQ ID NO: 797229 - protein, 55 aa, unidentified
  VARIANT 2: note = Any amino acid
  VARIANT 3: note = Any amino acid
  VARIANT 4: note = Any amino acid
  VARIANT 5: note = Any amino acid
  VARIANT 6: note = Any amino acid
  VARIANT 7: note = Any amino acid
  VARIANT 8: note = Any amino acid
  VARIANT 9: note = Any amino acid
  VARIANT 10: note = Any amino acid
  VARIANT 11: note = Any amino acid
  VARIANT 12: note = Any amino acid
  VARIANT 13: note = Any amino acid
  VARIANT 14: note = Any amino acid
  VARIANT 15: note = Any amino acid
  VARIANT 16: note = Any amino acid
  VARIANT 17: note = Any amino acid
  VARIANT 18: note = Any amino acid
  VARIANT 19: note = Any amino acid
  VARIANT 20: note = Any amino acid
  VARIANT 21: note = Any amino acid
  VARIANT 22: note = Any amino acid
  VARIANT 23: note = Any amino acid
  VARIANT 24: note = Any amino acid
  VARIANT 25: note = Any amino acid
  VARIANT 26: note = Any amino acid
  VARIANT 27: note = Any amino acid
  VARIANT 28: note = Any amino acid
  VARIANT 29: note = Any amino acid
  VARIANT 30: note = Any amino acid
  VARIANT 32: note = Any amino acid
  VARIANT 33: note = Any amino acid
  VARIANT 34: note = Any amino acid
  VARIANT 35: note = Any amino acid
  VARIANT 36: note = Any amino acid
  VARIANT 37: note = Any amino acid
  VARIANT 38: note = Any amino acid
  VARIANT 41: note = Any amino acid
  VARIANT 42: note = Any amino acid
  VARIANT 43: note = Any amino acid
  VARIANT 44: note = Any amino acid
  VARIANT 45: note = Any amino acid
  VARIANT 46: note = Any amino acid
  VARIANT 47: note = Any amino acid
  VARIANT 48: note = Any amino acid
  VARIANT 49: note = Any amino acid
  VARIANT 50: note = Any amino acid
  VARIANT 51: note = Any amino acid
  VARIANT 52: note = Any amino acid
  VARIANT 53: note = Any amino acid
  VARIANT 54: note = Any amino acid
GXXXXXXXXXXXXXXXXXXXXXXXXXXXXXGXXXXXXXTGXXXXXXXXXXXXXXA

SEQ ID NO: 797230 - protein, 52 aa, unidentified
  VARIANT 2: note = Any amino acid
  VARIANT 3: note = Any amino acid
  VARIANT 4: note = Any amino acid
  VARIANT 5: note = Any amino acid
  VARIANT 6: note = Any amino acid
  VARIANT 7: note = Any amino acid
  VARIANT 8: note = Any amino acid
  VARIANT 9: note = Any amino acid
  VARIANT 10: note = Any amino acid
  VARIANT 11: note = Any amino acid
  VARIANT 12: note = Any amino acid
  VARIANT 13: note = Any amino acid
  VARIANT 14: note = Any amino acid
  VARIANT 15: note = Any amino acid
  VARIANT 16: note = Any amino acid
  VARIANT 17: note = Any amino acid
  VARIANT 18: note = Any amino acid
  VARIANT 19: note = Any amino acid
  VARIANT 20: note = Any amino acid
  VARIANT 21: note = Any amino acid
  VARIANT 22: note = Any amino acid
  VARIANT 23: note = Any amino acid
  VARIANT 24: note = Any amino acid
  VARIANT 25: note = Any amino acid
  VARIANT 26: note = Any amino acid
  VARIANT 27: note = Any amino acid
  VARIANT 28: note = Any amino acid
  VARIANT 29: note = Any amino acid
  VARIANT 30: note = Any amino acid
  VARIANT 31: note = Any amino acid
  VARIANT 33: note = Any amino acid
  VARIANT 34: note = Any amino acid
  VARIANT 35: note = Any amino acid
  VARIANT 36: note = Any amino acid
  VARIANT 37: note = Any amino acid
  VARIANT 38: note = Any amino acid
  VARIANT 39: note = Any amino acid
  VARIANT 42: note = Any amino acid
  VARIANT 43: note = Any amino acid
  VARIANT 44: note = Any amino acid
  VARIANT 45: note = Any amino acid
  VARIANT 46: note = Any amino acid
  VARIANT 47: note = Any amino acid
  VARIANT 48: note = Any amino acid
  VARIANT 49: note = Any amino acid
  VARIANT 50: note = Any amino acid
  VARIANT 51: note = Any amino acid
GXXXXXXXXXXXXXXXXXXXXXXXXXXXXXXGXXXXXXXSAXXXXXXXXXXK

SEQ ID NO: 797231 - protein, 52 aa, unidentified
  VARIANT 2: note = Any amino acid
  VARIANT 3: note = Any amino acid
  VARIANT 4: note = Any amino acid
  VARIANT 5: note = Any amino acid
  VARIANT 6: note = Any amino acid
  VARIANT 7: note = Any amino acid
  VARIANT 8: note = Any amino acid
  VARIANT 9: note = Any amino acid
  VARIANT 10: note = Any amino acid
  VARIANT 11: note = Any amino acid
  VARIANT 12: note = Any amino acid
  VARIANT 13: note = Any amino acid
  VARIANT 14: note = Any amino acid
  VARIANT 15: note = Any amino acid
  VARIANT 16: note = Any amino acid
  VARIANT 17: note = Any amino acid
  VARIANT 18: note = Any amino acid
  VARIANT 19: note = Any amino acid
  VARIANT 20: note = Any amino acid
  VARIANT 21: note = Any amino acid
  VARIANT 22: note = Any amino acid
  VARIANT 23: note = Any amino acid
  VARIANT 24: note = Any amino acid
  VARIANT 25: note = Any amino acid
  VARIANT 26: note = Any amino acid
  VARIANT 27: note = Any amino acid
  VARIANT 28: note = Any amino acid
  VARIANT 29: note = Any amino acid
  VARIANT 30: note = Any amino acid
  VARIANT 31: note = Any amino acid
  VARIANT 33: note = Any amino acid
  VARIANT 34: note = Any amino acid
  VARIANT 35: note = Any amino acid
  VARIANT 36: note = Any amino acid
  VARIANT 37: note = Any amino acid
  VARIANT 38: note = Any amino acid
  VARIANT 39: note = Any amino acid
  VARIANT 42: note = Any amino acid
  VARIANT 43: note = Any amino acid
  VARIANT 44: note = Any amino acid
  VARIANT 45: note = Any amino acid
  VARIANT 46: note = Any amino acid
  VARIANT 47: note = Any amino acid
  VARIANT 48: note = Any amino acid
  VARIANT 49: note = Any amino acid
  VARIANT 50: note = Any amino acid
  VARIANT 51: note = Any amino acid
GXXXXXXXXXXXXXXXXXXXXXXXXXXXXXXRXXXXXXXTGXXXXXXXXXXT

SEQ ID NO: 797232 - protein, 54 aa, unidentified
  VARIANT 2: note = Any amino acid
  VARIANT 3: note = Any amino acid
  VARIANT 4: note = Any amino acid
  VARIANT 5: note = Any amino acid
  VARIANT 6: note = Any amino acid
  VARIANT 7: note = Any amino acid
  VARIANT 8: note = Any amino acid
  VARIANT 9: note = Any amino acid
  VARIANT 10: note = Any amino acid
  VARIANT 11: note = Any amino acid
  VARIANT 12: note = Any amino acid
  VARIANT 13: note = Any amino acid
  VARIANT 14: note = Any amino acid
  VARIANT 15: note = Any amino acid
  VARIANT 16: note = Any amino acid
  VARIANT 17: note = Any amino acid
  VARIANT 18: note = Any amino acid
  VARIANT 19: note = Any amino acid
  VARIANT 20: note = Any amino acid
  VARIANT 21: note = Any amino acid
  VARIANT 22: note = Any amino acid
  VARIANT 23: note = Any amino acid
  VARIANT 24: note = Any amino acid
  VARIANT 25: note = Any amino acid
  VARIANT 26: note = Any amino acid
  VARIANT 27: note = Any amino acid
  VARIANT 28: note = Any amino acid
  VARIANT 29: note = Any amino acid
  VARIANT 30: note = Any amino acid
  VARIANT 31: note = Any amino acid
  VARIANT 32: note = Any amino acid
  VARIANT 34: note = Any amino acid
  VARIANT 35: note = Any amino acid
  VARIANT 36: note = Any amino acid
  VARIANT 37: note = Any amino acid
  VARIANT 38: note = Any amino acid
  VARIANT 39: note = Any amino acid
  VARIANT 40: note = Any amino acid
  VARIANT 43: note = Any amino acid
  VARIANT 44: note = Any amino acid
  VARIANT 45: note = Any amino acid
  VARIANT 46: note = Any amino acid
  VARIANT 47: note = Any amino acid
  VARIANT 48: note = Any amino acid
  VARIANT 49: note = Any amino acid
  VARIANT 50: note = Any amino acid
  VARIANT 51: note = Any amino acid
  VARIANT 52: note = Any amino acid
  VARIANT 53: note = Any amino acid
GXXXXXXXXXXXXXXXXXXXXXXXXXXXXXXXGXXXXXXXSAXXXXXXXXXXXG

SEQ ID NO: 797233 - protein, 52 aa, unidentified
  VARIANT 2: note = Any amino acid
  VARIANT 3: note = Any amino acid
  VARIANT 4: note = Any amino acid
  VARIANT 5: note = Any amino acid
  VARIANT 6: note = Any amino acid
  VARIANT 7: note = Any amino acid
  VARIANT 8: note = Any amino acid
  VARIANT 9: note = Any amino acid
  VARIANT 10: note = Any amino acid
  VARIANT 11: note = Any amino acid
  VARIANT 12: note = Any amino acid
  VARIANT 13: note = Any amino acid
  VARIANT 14: note = Any amino acid
  VARIANT 15: note = Any amino acid
  VARIANT 16: note = Any amino acid
  VARIANT 17: note = Any amino acid
  VARIANT 18: note = Any amino acid
  VARIANT 19: note = Any amino acid
  VARIANT 20: note = Any amino acid
  VARIANT 21: note = Any amino acid
  VARIANT 22: note = Any amino acid
  VARIANT 23: note = Any amino acid
  VARIANT 24: note = Any amino acid
  VARIANT 25: note = Any amino acid
  VARIANT 26: note = Any amino acid
  VARIANT 27: note = Any amino acid
  VARIANT 28: note = Any amino acid
  VARIANT 29: note = Any amino acid
  VARIANT 30: note = Any amino acid
  VARIANT 32: note = Any amino acid
  VARIANT 33: note = Any amino acid
  VARIANT 34: note = Any amino acid
  VARIANT 35: note = Any amino acid
  VARIANT 36: note = Any amino acid
  VARIANT 37: note = Any amino acid
  VARIANT 38: note = Any amino acid
  VARIANT 41: note = Any amino acid
  VARIANT 42: note = Any amino acid
  VARIANT 43: note = Any amino acid
  VARIANT 44: note = Any amino acid
  VARIANT 45: note = Any amino acid
  VARIANT 46: note = Any amino acid
  VARIANT 47: note = Any amino acid
  VARIANT 48: note = Any amino acid
  VARIANT 49: note = Any amino acid
  VARIANT 50: note = Any amino acid
  VARIANT 51: note = Any amino acid
RXXXXXXXXXXXXXXXXXXXXXXXXXXXXXGXXXXXXXSGXXXXXXXXXXXG

SEQ ID NO: 797234 - protein, 51 aa, unidentified
  VARIANT 2: note = Any amino acid
  VARIANT 3: note = Any amino acid
  VARIANT 4: note = Any amino acid
  VARIANT 5: note = Any amino acid
  VARIANT 6: note = Any amino acid
  VARIANT 7: note = Any amino acid
  VARIANT 8: note = Any amino acid
  VARIANT 9: note = Any amino acid
  VARIANT 10: note = Any amino acid
  VARIANT 11: note = Any amino acid
  VARIANT 12: note = Any amino acid
  VARIANT 13: note = Any amino acid
  VARIANT 14: note = Any amino acid
  VARIANT 15: note = Any amino acid
  VARIANT 16: note = Any amino acid
  VARIANT 17: note = Any amino acid
  VARIANT 18: note = Any amino acid
  VARIANT 19: note = Any amino acid
  VARIANT 20: note = Any amino acid
  VARIANT 21: note = Any amino acid
  VARIANT 22: note = Any amino acid
  VARIANT 23: note = Any amino acid
  VARIANT 24: note = Any amino acid
  VARIANT 25: note = Any amino acid
  VARIANT 26: note = Any amino acid
  VARIANT 27: note = Any amino acid
  VARIANT 28: note = Any amino acid
  VARIANT 29: note = Any amino acid
  VARIANT 31: note = Any amino acid
  VARIANT 32: note = Any amino acid
  VARIANT 33: note = Any amino acid
  VARIANT 34: note = Any amino acid
  VARIANT 35: note = Any amino acid
  VARIANT 36: note = Any amino acid
  VARIANT 37: note = Any amino acid
  VARIANT 40: note = Any amino acid
  VARIANT 41: note = Any amino acid
  VARIANT 42: note = Any amino acid
  VARIANT 43: note = Any amino acid
  VARIANT 44: note = Any amino acid
  VARIANT 45: note = Any amino acid
  VARIANT 46: note = Any amino acid
  VARIANT 47: note = Any amino acid
  VARIANT 48: note = Any amino acid
  VARIANT 49: note = Any amino acid
  VARIANT 50: note = Any amino acid
SXXXXXXXXXXXXXXXXXXXXXXXXXXXXGXXXXXXXSGXXXXXXXXXXXG

SEQ ID NO: 797235 - protein, 52 aa, unidentified
  VARIANT 2: note = Any amino acid
  VARIANT 3: note = Any amino acid
  VARIANT 4: note = Any amino acid
  VARIANT 5: note = Any amino acid
  VARIANT 6: note = Any amino acid
  VARIANT 7: note = Any amino acid
  VARIANT 8: note = Any amino acid
  VARIANT 9: note = Any amino acid
  VARIANT 10: note = Any amino acid
  VARIANT 11: note = Any amino acid
  VARIANT 12: note = Any amino acid
  VARIANT 13: note = Any amino acid
  VARIANT 14: note = Any amino acid
  VARIANT 15: note = Any amino acid
  VARIANT 16: note = Any amino acid
  VARIANT 17: note = Any amino acid
  VARIANT 18: note = Any amino acid
  VARIANT 19: note = Any amino acid
  VARIANT 20: note = Any amino acid
  VARIANT 21: note = Any amino acid
  VARIANT 22: note = Any amino acid
  VARIANT 23: note = Any amino acid
  VARIANT 24: note = Any amino acid
  VARIANT 25: note = Any amino acid
  VARIANT 26: note = Any amino acid
  VARIANT 27: note = Any amino acid
  VARIANT 28: note = Any amino acid
  VARIANT 29: note = Any amino acid
  VARIANT 30: note = Any amino acid
  VARIANT 32: note = Any amino acid
  VARIANT 33: note = Any amino acid
  VARIANT 34: note = Any amino acid
  VARIANT 35: note = Any amino acid
  VARIANT 36: note = Any amino acid
  VARIANT 37: note = Any amino acid
  VARIANT 38: note = Any amino acid
  VARIANT 41: note = Any amino acid
  VARIANT 42: note = Any amino acid
  VARIANT 43: note = Any amino acid
  VARIANT 44: note = Any amino acid
  VARIANT 45: note = Any amino acid
  VARIANT 46: note = Any amino acid
  VARIANT 47: note = Any amino acid
  VARIANT 48: note = Any amino acid
  VARIANT 49: note = Any amino acid
  VARIANT 50: note = Any amino acid
  VARIANT 51: note = Any amino acid
SXXXXXXXXXXXXXXXXXXXXXXXXXXXXXGXXXXXXXSGXXXXXXXXXXXA

SEQ ID NO: 797236 - protein, 53 aa, unidentified
  VARIANT 2: note = Any amino acid
  VARIANT 3: note = Any amino acid
  VARIANT 4: note = Any amino acid
  VARIANT 5: note = Any amino acid
  VARIANT 6: note = Any amino acid
  VARIANT 7: note = Any amino acid
  VARIANT 8: note = Any amino acid
  VARIANT 9: note = Any amino acid
  VARIANT 10: note = Any amino acid
  VARIANT 11: note = Any amino acid
  VARIANT 12: note = Any amino acid
  VARIANT 13: note = Any amino acid
  VARIANT 14: note = Any amino acid
  VARIANT 15: note = Any amino acid
  VARIANT 16: note = Any amino acid
  VARIANT 17: note = Any amino acid
  VARIANT 18: note = Any amino acid
  VARIANT 19: note = Any amino acid
  VARIANT 20: note = Any amino acid
  VARIANT 21: note = Any amino acid
  VARIANT 22: note = Any amino acid
  VARIANT 23: note = Any amino acid
  VARIANT 24: note = Any amino acid
  VARIANT 25: note = Any amino acid
  VARIANT 26: note = Any amino acid
  VARIANT 27: note = Any amino acid
  VARIANT 28: note = Any amino acid
  VARIANT 29: note = Any amino acid
  VARIANT 30: note = Any amino acid
  VARIANT 32: note = Any amino acid
  VARIANT 33: note = Any amino acid
  VARIANT 34: note = Any amino acid
  VARIANT 35: note = Any amino acid
  VARIANT 36: note = Any amino acid
  VARIANT 37: note = Any amino acid
  VARIANT 38: note = Any amino acid
  VARIANT 41: note = Any amino acid
  VARIANT 42: note = Any amino acid
  VARIANT 43: note = Any amino acid
  VARIANT 44: note = Any amino acid
  VARIANT 45: note = Any amino acid
  VARIANT 46: note = Any amino acid
  VARIANT 47: note = Any amino acid
  VARIANT 48: note = Any amino acid
  VARIANT 49: note = Any amino acid
  VARIANT 50: note = Any amino acid
  VARIANT 51: note = Any amino acid
  VARIANT 52: note = Any amino acid
EXXXXXXXXXXXXXXXXXXXXXXXXXXXXXGXXXXXXXSGXXXXXXXXXXXXG

SEQ ID NO: 797237 - protein, 52 aa, unidentified
  VARIANT 2: note = Any amino acid
  VARIANT 3: note = Any amino acid
  VARIANT 4: note = Any amino acid
  VARIANT 5: note = Any amino acid
  VARIANT 6: note = Any amino acid
  VARIANT 7: note = Any amino acid
  VARIANT 8: note = Any amino acid
  VARIANT 9: note = Any amino acid
  VARIANT 10: note = Any amino acid
  VARIANT 11: note = Any amino acid
  VARIANT 12: note = Any amino acid
  VARIANT 13: note = Any amino acid
  VARIANT 14: note = Any amino acid
  VARIANT 15: note = Any amino acid
  VARIANT 16: note = Any amino acid
  VARIANT 17: note = Any amino acid
  VARIANT 18: note = Any amino acid
  VARIANT 19: note = Any amino acid
  VARIANT 20: note = Any amino acid
  VARIANT 21: note = Any amino acid
  VARIANT 22: note = Any amino acid
  VARIANT 23: note = Any amino acid
  VARIANT 24: note = Any amino acid
  VARIANT 25: note = Any amino acid
  VARIANT 26: note = Any amino acid
  VARIANT 27: note = Any amino acid
  VARIANT 28: note = Any amino acid
  VARIANT 29: note = Any amino acid
  VARIANT 30: note = Any amino acid
  VARIANT 31: note = Any amino acid
  VARIANT 33: note = Any amino acid
  VARIANT 34: note = Any amino acid
  VARIANT 35: note = Any amino acid
  VARIANT 36: note = Any amino acid
  VARIANT 37: note = Any amino acid
  VARIANT 38: note = Any amino acid
  VARIANT 39: note = Any amino acid
  VARIANT 42: note = Any amino acid
  VARIANT 43: note = Any amino acid
  VARIANT 44: note = Any amino acid
  VARIANT 45: note = Any amino acid
  VARIANT 46: note = Any amino acid
  VARIANT 47: note = Any amino acid
  VARIANT 48: note = Any amino acid
  VARIANT 49: note = Any amino acid
  VARIANT 50: note = Any amino acid
  VARIANT 51: note = Any amino acid
GXXXXXXXXXXXXXXXXXXXXXXXXXXXXXXCXXXXXXXSGXXXXXXXXXXG

SEQ ID NO: 797238 - protein, 50 aa, unidentified
  VARIANT 2: note = Any amino acid
  VARIANT 3: note = Any amino acid
  VARIANT 4: note = Any amino acid
  VARIANT 5: note = Any amino acid
  VARIANT 6: note = Any amino acid
  VARIANT 7: note = Any amino acid
  VARIANT 8: note = Any amino acid
  VARIANT 9: note = Any amino acid
  VARIANT 10: note = Any amino acid
  VARIANT 11: note = Any amino acid
  VARIANT 12: note = Any amino acid
  VARIANT 13: note = Any amino acid
  VARIANT 14: note = Any amino acid
  VARIANT 15: note = Any amino acid
  VARIANT 16: note = Any amino acid
  VARIANT 17: note = Any amino acid
  VARIANT 18: note = Any amino acid
  VARIANT 19: note = Any amino acid
  VARIANT 20: note = Any amino acid
  VARIANT 21: note = Any amino acid
  VARIANT 22: note = Any amino acid
  VARIANT 23: note = Any amino acid
  VARIANT 24: note = Any amino acid
  VARIANT 25: note = Any amino acid
  VARIANT 26: note = Any amino acid
  VARIANT 27: note = Any amino acid
  VARIANT 28: note = Any amino acid
  VARIANT 29: note = Any amino acid
  VARIANT 31: note = Any amino acid
  VARIANT 32: note = Any amino acid
  VARIANT 33: note = Any amino acid
  VARIANT 34: note = Any amino acid
  VARIANT 35: note = Any amino acid
  VARIANT 36: note = Any amino acid
  VARIANT 37: note = Any amino acid
  VARIANT 40: note = Any amino acid
  VARIANT 41: note = Any amino acid
  VARIANT 42: note = Any amino acid
  VARIANT 43: note = Any amino acid
  VARIANT 44: note = Any amino acid
  VARIANT 45: note = Any amino acid
  VARIANT 46: note = Any amino acid
  VARIANT 47: note = Any amino acid
  VARIANT 48: note = Any amino acid
  VARIANT 49: note = Any amino acid
GXXXXXXXXXXXXXXXXXXXXXXXXXXXXGXXXXXXXSSXXXXXXXXXXG

SEQ ID NO: 797239 - protein, 53 aa, unidentified
  VARIANT 2: note = Any amino acid
  VARIANT 3: note = Any amino acid
  VARIANT 4: note = Any amino acid
  VARIANT 5: note = Any amino acid
  VARIANT 6: note = Any amino acid
  VARIANT 7: note = Any amino acid
  VARIANT 8: note = Any amino acid
  VARIANT 9: note = Any amino acid
  VARIANT 10: note = Any amino acid
  VARIANT 11: note = Any amino acid
  VARIANT 12: note = Any amino acid
  VARIANT 13: note = Any amino acid
  VARIANT 14: note = Any amino acid
  VARIANT 15: note = Any amino acid
  VARIANT 16: note = Any amino acid
  VARIANT 17: note = Any amino acid
  VARIANT 18: note = Any amino acid
  VARIANT 19: note = Any amino acid
  VARIANT 20: note = Any amino acid
  VARIANT 21: note = Any amino acid
  VARIANT 22: note = Any amino acid
  VARIANT 23: note = Any amino acid
  VARIANT 24: note = Any amino acid
  VARIANT 25: note = Any amino acid
  VARIANT 26: note = Any amino acid
  VARIANT 27: note = Any amino acid
  VARIANT 28: note = Any amino acid
  VARIANT 29: note = Any amino acid
  VARIANT 30: note = Any amino acid
  VARIANT 32: note = Any amino acid
  VARIANT 33: note = Any amino acid
  VARIANT 34: note = Any amino acid
  VARIANT 35: note = Any amino acid
  VARIANT 36: note = Any amino acid
  VARIANT 37: note = Any amino acid
  VARIANT 38: note = Any amino acid
  VARIANT 41: note = Any amino acid
  VARIANT 42: note = Any amino acid
  VARIANT 43: note = Any amino acid
  VARIANT 44: note = Any amino acid
  VARIANT 45: note = Any amino acid
  VARIANT 46: note = Any amino acid
  VARIANT 47: note = Any amino acid
  VARIANT 48: note = Any amino acid
  VARIANT 49: note = Any amino acid
  VARIANT 50: note = Any amino acid
  VARIANT 51: note = Any amino acid
  VARIANT 52: note = Any amino acid
GXXXXXXXXXXXXXXXXXXXXXXXXXXXXXAXXXXXXXSGXXXXXXXXXXXXG

SEQ ID NO: 797240 - protein, 50 aa, unidentified
  VARIANT 2: note = Any amino acid
  VARIANT 3: note = Any amino acid
  VARIANT 4: note = Any amino acid
  VARIANT 5: note = Any amino acid
  VARIANT 6: note = Any amino acid
  VARIANT 7: note = Any amino acid
  VARIANT 8: note = Any amino acid
  VARIANT 9: note = Any amino acid
  VARIANT 10: note = Any amino acid
  VARIANT 11: note = Any amino acid
  VARIANT 12: note = Any amino acid
  VARIANT 13: note = Any amino acid
  VARIANT 14: note = Any amino acid
  VARIANT 15: note = Any amino acid
  VARIANT 16: note = Any amino acid
  VARIANT 17: note = Any amino acid
  VARIANT 18: note = Any amino acid
  VARIANT 19: note = Any amino acid
  VARIANT 20: note = Any amino acid
  VARIANT 21: note = Any amino acid
  VARIANT 22: note = Any amino acid
  VARIANT 23: note = Any amino acid
  VARIANT 24: note = Any amino acid
  VARIANT 25: note = Any amino acid
  VARIANT 26: note = Any amino acid
  VARIANT 27: note = Any amino acid
  VARIANT 28: note = Any amino acid
  VARIANT 29: note = Any amino acid
  VARIANT 30: note = Any amino acid
  VARIANT 31: note = Any amino acid
  VARIANT 33: note = Any amino acid
  VARIANT 34: note = Any amino acid
  VARIANT 35: note = Any amino acid
  VARIANT 36: note = Any amino acid
  VARIANT 37: note = Any amino acid
  VARIANT 38: note = Any amino acid
  VARIANT 39: note = Any amino acid
  VARIANT 42: note = Any amino acid
  VARIANT 43: note = Any amino acid
  VARIANT 44: note = Any amino acid
  VARIANT 45: note = Any amino acid
  VARIANT 46: note = Any amino acid
  VARIANT 47: note = Any amino acid
  VARIANT 48: note = Any amino acid
  VARIANT 49: note = Any amino acid
GXXXXXXXXXXXXXXXXXXXXXXXXXXXXXXGXXXXXXXSGXXXXXXXXH

SEQ ID NO: 797241 - protein, 52 aa, unidentified
  VARIANT 2: note = Any amino acid
  VARIANT 3: note = Any amino acid
  VARIANT 4: note = Any amino acid
  VARIANT 5: note = Any amino acid
  VARIANT 6: note = Any amino acid
  VARIANT 7: note = Any amino acid
  VARIANT 8: note = Any amino acid
  VARIANT 9: note = Any amino acid
  VARIANT 10: note = Any amino acid
  VARIANT 11: note = Any amino acid
  VARIANT 12: note = Any amino acid
  VARIANT 13: note = Any amino acid
  VARIANT 14: note = Any amino acid
  VARIANT 15: note = Any amino acid
  VARIANT 16: note = Any amino acid
  VARIANT 17: note = Any amino acid
  VARIANT 18: note = Any amino acid
  VARIANT 19: note = Any amino acid
  VARIANT 20: note = Any amino acid
  VARIANT 21: note = Any amino acid
  VARIANT 22: note = Any amino acid
  VARIANT 23: note = Any amino acid
  VARIANT 24: note = Any amino acid
  VARIANT 25: note = Any amino acid
  VARIANT 26: note = Any amino acid
  VARIANT 27: note = Any amino acid
  VARIANT 28: note = Any amino acid
  VARIANT 29: note = Any amino acid
  VARIANT 30: note = Any amino acid
  VARIANT 32: note = Any amino acid
  VARIANT 33: note = Any amino acid
  VARIANT 34: note = Any amino acid
  VARIANT 35: note = Any amino acid
  VARIANT 36: note = Any amino acid
  VARIANT 37: note = Any amino acid
  VARIANT 38: note = Any amino acid
  VARIANT 41: note = Any amino acid
  VARIANT 42: note = Any amino acid
  VARIANT 43: note = Any amino acid
  VARIANT 44: note = Any amino acid
  VARIANT 45: note = Any amino acid
  VARIANT 46: note = Any amino acid
  VARIANT 47: note = Any amino acid
  VARIANT 48: note = Any amino acid
  VARIANT 49: note = Any amino acid
  VARIANT 50: note = Any amino acid
  VARIANT 51: note = Any amino acid
YXXXXXXXXXXXXXXXXXXXXXXXXXXXXXGXXXXXXXSGXXXXXXXXXXXG

SEQ ID NO: 797242 - protein, 51 aa, unidentified
  VARIANT 2: note = Any amino acid
  VARIANT 3: note = Any amino acid
  VARIANT 4: note = Any amino acid
  VARIANT 5: note = Any amino acid
  VARIANT 6: note = Any amino acid
  VARIANT 7: note = Any amino acid
  VARIANT 8: note = Any amino acid
  VARIANT 9: note = Any amino acid
  VARIANT 10: note = Any amino acid
  VARIANT 11: note = Any amino acid
  VARIANT 12: note = Any amino acid
  VARIANT 13: note = Any amino acid
  VARIANT 14: note = Any amino acid
  VARIANT 15: note = Any amino acid
  VARIANT 16: note = Any amino acid
  VARIANT 17: note = Any amino acid
  VARIANT 18: note = Any amino acid
  VARIANT 19: note = Any amino acid
  VARIANT 20: note = Any amino acid
  VARIANT 21: note = Any amino acid
  VARIANT 22: note = Any amino acid
  VARIANT 23: note = Any amino acid
  VARIANT 24: note = Any amino acid
  VARIANT 25: note = Any amino acid
  VARIANT 26: note = Any amino acid
  VARIANT 27: note = Any amino acid
  VARIANT 28: note = Any amino acid
  VARIANT 29: note = Any amino acid
  VARIANT 30: note = Any amino acid
  VARIANT 32: note = Any amino acid
  VARIANT 33: note = Any amino acid
  VARIANT 34: note = Any amino acid
  VARIANT 35: note = Any amino acid
  VARIANT 36: note = Any amino acid
  VARIANT 37: note = Any amino acid
  VARIANT 38: note = Any amino acid
  VARIANT 41: note = Any amino acid
  VARIANT 42: note = Any amino acid
  VARIANT 43: note = Any amino acid
  VARIANT 44: note = Any amino acid
  VARIANT 45: note = Any amino acid
  VARIANT 46: note = Any amino acid
  VARIANT 47: note = Any amino acid
  VARIANT 48: note = Any amino acid
  VARIANT 49: note = Any amino acid
  VARIANT 50: note = Any amino acid
GXXXXXXXXXXXXXXXXXXXXXXXXXXXXXAXXXXXXXSGXXXXXXXXXXV

SEQ ID NO: 797243 - protein, 55 aa, unidentified
  VARIANT 2: note = Any amino acid
  VARIANT 3: note = Any amino acid
  VARIANT 4: note = Any amino acid
  VARIANT 5: note = Any amino acid
  VARIANT 6: note = Any amino acid
  VARIANT 7: note = Any amino acid
  VARIANT 8: note = Any amino acid
  VARIANT 9: note = Any amino acid
  VARIANT 10: note = Any amino acid
  VARIANT 11: note = Any amino acid
  VARIANT 12: note = Any amino acid
  VARIANT 13: note = Any amino acid
  VARIANT 14: note = Any amino acid
  VARIANT 15: note = Any amino acid
  VARIANT 16: note = Any amino acid
  VARIANT 17: note = Any amino acid
  VARIANT 18: note = Any amino acid
  VARIANT 19: note = Any amino acid
  VARIANT 20: note = Any amino acid
  VARIANT 21: note = Any amino acid
  VARIANT 22: note = Any amino acid
  VARIANT 23: note = Any amino acid
  VARIANT 24: note = Any amino acid
  VARIANT 25: note = Any amino acid
  VARIANT 26: note = Any amino acid
  VARIANT 27: note = Any amino acid
  VARIANT 28: note = Any amino acid
  VARIANT 29: note = Any amino acid
  VARIANT 30: note = Any amino acid
  VARIANT 31: note = Any amino acid
  VARIANT 32: note = Any amino acid
  VARIANT 33: note = Any amino acid
  VARIANT 35: note = Any amino acid
  VARIANT 36: note = Any amino acid
  VARIANT 37: note = Any amino acid
  VARIANT 38: note = Any amino acid
  VARIANT 39: note = Any amino acid
  VARIANT 40: note = Any amino acid
  VARIANT 41: note = Any amino acid
  VARIANT 44: note = Any amino acid
  VARIANT 45: note = Any amino acid
  VARIANT 46: note = Any amino acid
  VARIANT 47: note = Any amino acid
  VARIANT 48: note = Any amino acid
  VARIANT 49: note = Any amino acid
  VARIANT 50: note = Any amino acid
  VARIANT 51: note = Any amino acid
  VARIANT 52: note = Any amino acid
  VARIANT 53: note = Any amino acid
  VARIANT 54: note = Any amino acid
GXXXXXXXXXXXXXXXXXXXXXXXXXXXXXXXXGXXXXXXXSAXXXXXXXXXXXG

SEQ ID NO: 797244 - protein, 52 aa, unidentified
  VARIANT 2: note = Any amino acid
  VARIANT 3: note = Any amino acid
  VARIANT 4: note = Any amino acid
  VARIANT 5: note = Any amino acid
  VARIANT 6: note = Any amino acid
  VARIANT 7: note = Any amino acid
  VARIANT 8: note = Any amino acid
  VARIANT 9: note = Any amino acid
  VARIANT 10: note = Any amino acid
  VARIANT 11: note = Any amino acid
  VARIANT 12: note = Any amino acid
  VARIANT 13: note = Any amino acid
  VARIANT 14: note = Any amino acid
  VARIANT 15: note = Any amino acid
  VARIANT 16: note = Any amino acid
  VARIANT 17: note = Any amino acid
  VARIANT 18: note = Any amino acid
  VARIANT 19: note = Any amino acid
  VARIANT 20: note = Any amino acid
  VARIANT 21: note = Any amino acid
  VARIANT 22: note = Any amino acid
  VARIANT 23: note = Any amino acid
  VARIANT 24: note = Any amino acid
  VARIANT 25: note = Any amino acid
  VARIANT 26: note = Any amino acid
  VARIANT 27: note = Any amino acid
  VARIANT 28: note = Any amino acid
  VARIANT 29: note = Any amino acid
  VARIANT 30: note = Any amino acid
  VARIANT 32: note = Any amino acid
  VARIANT 33: note = Any amino acid
  VARIANT 34: note = Any amino acid
  VARIANT 35: note = Any amino acid
  VARIANT 36: note = Any amino acid
  VARIANT 37: note = Any amino acid
  VARIANT 38: note = Any amino acid
  VARIANT 41: note = Any amino acid
  VARIANT 42: note = Any amino acid
  VARIANT 43: note = Any amino acid
  VARIANT 44: note = Any amino acid
  VARIANT 45: note = Any amino acid
  VARIANT 46: note = Any amino acid
  VARIANT 47: note = Any amino acid
  VARIANT 48: note = Any amino acid
  VARIANT 49: note = Any amino acid
  VARIANT 50: note = Any amino acid
  VARIANT 51: note = Any amino acid
GXXXXXXXXXXXXXXXXXXXXXXXXXXXXXGXXXXXXXSGXXXXXXXXXXXR

SEQ ID NO: 797245 - protein, 50 aa, unidentified
  VARIANT 2: note = Any amino acid
  VARIANT 3: note = Any amino acid
  VARIANT 4: note = Any amino acid
  VARIANT 5: note = Any amino acid
  VARIANT 6: note = Any amino acid
  VARIANT 7: note = Any amino acid
  VARIANT 8: note = Any amino acid
  VARIANT 9: note = Any amino acid
  VARIANT 10: note = Any amino acid
  VARIANT 11: note = Any amino acid
  VARIANT 12: note = Any amino acid
  VARIANT 13: note = Any amino acid
  VARIANT 14: note = Any amino acid
  VARIANT 15: note = Any amino acid
  VARIANT 16: note = Any amino acid
  VARIANT 17: note = Any amino acid
  VARIANT 18: note = Any amino acid
  VARIANT 19: note = Any amino acid
  VARIANT 20: note = Any amino acid
  VARIANT 21: note = Any amino acid
  VARIANT 22: note = Any amino acid
  VARIANT 23: note = Any amino acid
  VARIANT 24: note = Any amino acid
  VARIANT 25: note = Any amino acid
  VARIANT 26: note = Any amino acid
  VARIANT 27: note = Any amino acid
  VARIANT 28: note = Any amino acid
  VARIANT 29: note = Any amino acid
  VARIANT 30: note = Any amino acid
  VARIANT 31: note = Any amino acid
  VARIANT 33: note = Any amino acid
  VARIANT 34: note = Any amino acid
  VARIANT 35: note = Any amino acid
  VARIANT 36: note = Any amino acid
  VARIANT 37: note = Any amino acid
  VARIANT 38: note = Any amino acid
  VARIANT 39: note = Any amino acid
  VARIANT 42: note = Any amino acid
  VARIANT 43: note = Any amino acid
  VARIANT 44: note = Any amino acid
  VARIANT 45: note = Any amino acid
  VARIANT 46: note = Any amino acid
  VARIANT 47: note = Any amino acid
  VARIANT 48: note = Any amino acid
  VARIANT 49: note = Any amino acid
GXXXXXXXXXXXXXXXXXXXXXXXXXXXXXXGXXXXXXXSGXXXXXXXXG

SEQ ID NO: 797246 - protein, 50 aa, unidentified
  VARIANT 2: note = Any amino acid
  VARIANT 3: note = Any amino acid
  VARIANT 4: note = Any amino acid
  VARIANT 5: note = Any amino acid
  VARIANT 6: note = Any amino acid
  VARIANT 7: note = Any amino acid
  VARIANT 8: note = Any amino acid
  VARIANT 9: note = Any amino acid
  VARIANT 10: note = Any amino acid
  VARIANT 11: note = Any amino acid
  VARIANT 12: note = Any amino acid
  VARIANT 13: note = Any amino acid
  VARIANT 14: note = Any amino acid
  VARIANT 15: note = Any amino acid
  VARIANT 16: note = Any amino acid
  VARIANT 17: note = Any amino acid
  VARIANT 18: note = Any amino acid
  VARIANT 19: note = Any amino acid
  VARIANT 20: note = Any amino acid
  VARIANT 21: note = Any amino acid
  VARIANT 22: note = Any amino acid
  VARIANT 23: note = Any amino acid
  VARIANT 24: note = Any amino acid
  VARIANT 25: note = Any amino acid
  VARIANT 26: note = Any amino acid
  VARIANT 27: note = Any amino acid
  VARIANT 28: note = Any amino acid
  VARIANT 29: note = Any amino acid
  VARIANT 31: note = Any amino acid
  VARIANT 32: note = Any amino acid
  VARIANT 33: note = Any amino acid
  VARIANT 34: note = Any amino acid
  VARIANT 35: note = Any amino acid
  VARIANT 36: note = Any amino acid
  VARIANT 37: note = Any amino acid
  VARIANT 40: note = Any amino acid
  VARIANT 41: note = Any amino acid
  VARIANT 42: note = Any amino acid
  VARIANT 43: note = Any amino acid
  VARIANT 44: note = Any amino acid
  VARIANT 45: note = Any amino acid
  VARIANT 46: note = Any amino acid
  VARIANT 47: note = Any amino acid
  VARIANT 48: note = Any amino acid
  VARIANT 49: note = Any amino acid
GXXXXXXXXXXXXXXXXXXXXXXXXXXXXGXXXXXXXSGXXXXXXXXXXA

SEQ ID NO: 797247 - protein, 54 aa, unidentified
  VARIANT 2: note = Any amino acid
  VARIANT 3: note = Any amino acid
  VARIANT 4: note = Any amino acid
  VARIANT 5: note = Any amino acid
  VARIANT 6: note = Any amino acid
  VARIANT 7: note = Any amino acid
  VARIANT 8: note = Any amino acid
  VARIANT 9: note = Any amino acid
  VARIANT 10: note = Any amino acid
  VARIANT 11: note = Any amino acid
  VARIANT 12: note = Any amino acid
  VARIANT 13: note = Any amino acid
  VARIANT 14: note = Any amino acid
  VARIANT 15: note = Any amino acid
  VARIANT 16: note = Any amino acid
  VARIANT 17: note = Any amino acid
  VARIANT 18: note = Any amino acid
  VARIANT 19: note = Any amino acid
  VARIANT 20: note = Any amino acid
  VARIANT 21: note = Any amino acid
  VARIANT 22: note = Any amino acid
  VARIANT 23: note = Any amino acid
  VARIANT 24: note = Any amino acid
  VARIANT 25: note = Any amino acid
  VARIANT 26: note = Any amino acid
  VARIANT 27: note = Any amino acid
  VARIANT 28: note = Any amino acid
  VARIANT 29: note = Any amino acid
  VARIANT 30: note = Any amino acid
  VARIANT 31: note = Any amino acid
  VARIANT 32: note = Any amino acid
  VARIANT 34: note = Any amino acid
  VARIANT 35: note = Any amino acid
  VARIANT 36: note = Any amino acid
  VARIANT 37: note = Any amino acid
  VARIANT 38: note = Any amino acid
  VARIANT 39: note = Any amino acid
  VARIANT 40: note = Any amino acid
  VARIANT 43: note = Any amino acid
  VARIANT 44: note = Any amino acid
  VARIANT 45: note = Any amino acid
  VARIANT 46: note = Any amino acid
  VARIANT 47: note = Any amino acid
  VARIANT 48: note = Any amino acid
  VARIANT 49: note = Any amino acid
  VARIANT 50: note = Any amino acid
  VARIANT 51: note = Any amino acid
  VARIANT 52: note = Any amino acid
  VARIANT 53: note = Any amino acid
GXXXXXXXXXXXXXXXXXXXXXXXXXXXXXXXGXXXXXXXSGXXXXXXXXXXXG

SEQ ID NO: 797248 - protein, 54 aa, unidentified
  VARIANT 2: note = Any amino acid
  VARIANT 3: note = Any amino acid
  VARIANT 4: note = Any amino acid
  VARIANT 5: note = Any amino acid
  VARIANT 6: note = Any amino acid
  VARIANT 7: note = Any amino acid
  VARIANT 8: note = Any amino acid
  VARIANT 9: note = Any amino acid
  VARIANT 10: note = Any amino acid
  VARIANT 11: note = Any amino acid
  VARIANT 12: note = Any amino acid
  VARIANT 13: note = Any amino acid
  VARIANT 14: note = Any amino acid
  VARIANT 15: note = Any amino acid
  VARIANT 16: note = Any amino acid
  VARIANT 17: note = Any amino acid
  VARIANT 18: note = Any amino acid
  VARIANT 19: note = Any amino acid
  VARIANT 20: note = Any amino acid
  VARIANT 21: note = Any amino acid
  VARIANT 22: note = Any amino acid
  VARIANT 23: note = Any amino acid
  VARIANT 24: note = Any amino acid
  VARIANT 25: note = Any amino acid
  VARIANT 26: note = Any amino acid
  VARIANT 27: note = Any amino acid
  VARIANT 28: note = Any amino acid
  VARIANT 29: note = Any amino acid
  VARIANT 31: note = Any amino acid
  VARIANT 32: note = Any amino acid
  VARIANT 33: note = Any amino acid
  VARIANT 34: note = Any amino acid
  VARIANT 35: note = Any amino acid
  VARIANT 36: note = Any amino acid
  VARIANT 37: note = Any amino acid
  VARIANT 40: note = Any amino acid
  VARIANT 41: note = Any amino acid
  VARIANT 42: note = Any amino acid
  VARIANT 43: note = Any amino acid
  VARIANT 44: note = Any amino acid
  VARIANT 45: note = Any amino acid
  VARIANT 46: note = Any amino acid
  VARIANT 47: note = Any amino acid
  VARIANT 48: note = Any amino acid
  VARIANT 49: note = Any amino acid
  VARIANT 50: note = Any amino acid
  VARIANT 51: note = Any amino acid
  VARIANT 52: note = Any amino acid
  VARIANT 53: note = Any amino acid
GXXXXXXXXXXXXXXXXXXXXXXXXXXXXGXXXXXXXSGXXXXXXXXXXXXXXG

SEQ ID NO: 797249 - protein, 52 aa, unidentified
  VARIANT 2: note = Any amino acid
  VARIANT 3: note = Any amino acid
  VARIANT 4: note = Any amino acid
  VARIANT 5: note = Any amino acid
  VARIANT 6: note = Any amino acid
  VARIANT 7: note = Any amino acid
  VARIANT 8: note = Any amino acid
  VARIANT 9: note = Any amino acid
  VARIANT 10: note = Any amino acid
  VARIANT 11: note = Any amino acid
  VARIANT 12: note = Any amino acid
  VARIANT 13: note = Any amino acid
  VARIANT 14: note = Any amino acid
  VARIANT 15: note = Any amino acid
  VARIANT 16: note = Any amino acid
  VARIANT 17: note = Any amino acid
  VARIANT 18: note = Any amino acid
  VARIANT 19: note = Any amino acid
  VARIANT 20: note = Any amino acid
  VARIANT 21: note = Any amino acid
  VARIANT 22: note = Any amino acid
  VARIANT 23: note = Any amino acid
  VARIANT 24: note = Any amino acid
  VARIANT 25: note = Any amino acid
  VARIANT 26: note = Any amino acid
  VARIANT 27: note = Any amino acid
  VARIANT 28: note = Any amino acid
  VARIANT 29: note = Any amino acid
  VARIANT 30: note = Any amino acid
  VARIANT 32: note = Any amino acid
  VARIANT 33: note = Any amino acid
  VARIANT 34: note = Any amino acid
  VARIANT 35: note = Any amino acid
  VARIANT 36: note = Any amino acid
  VARIANT 37: note = Any amino acid
  VARIANT 38: note = Any amino acid
  VARIANT 41: note = Any amino acid
  VARIANT 42: note = Any amino acid
  VARIANT 43: note = Any amino acid
  VARIANT 44: note = Any amino acid
  VARIANT 45: note = Any amino acid
  VARIANT 46: note = Any amino acid
  VARIANT 47: note = Any amino acid
  VARIANT 48: note = Any amino acid
  VARIANT 49: note = Any amino acid
  VARIANT 50: note = Any amino acid
  VARIANT 51: note = Any amino acid
GXXXXXXXXXXXXXXXXXXXXXXXXXXXXXGXXXXXXXSDXXXXXXXXXXXG

SEQ ID NO: 797250 - protein, 50 aa, unidentified
  VARIANT 2: note = Any amino acid
  VARIANT 3: note = Any amino acid
  VARIANT 4: note = Any amino acid
  VARIANT 5: note = Any amino acid
  VARIANT 6: note = Any amino acid
  VARIANT 7: note = Any amino acid
  VARIANT 8: note = Any amino acid
  VARIANT 9: note = Any amino acid
  VARIANT 10: note = Any amino acid
  VARIANT 11: note = Any amino acid
  VARIANT 12: note = Any amino acid
  VARIANT 13: note = Any amino acid
  VARIANT 14: note = Any amino acid
  VARIANT 15: note = Any amino acid
  VARIANT 16: note = Any amino acid
  VARIANT 17: note = Any amino acid
  VARIANT 18: note = Any amino acid
  VARIANT 19: note = Any amino acid
  VARIANT 20: note = Any amino acid
  VARIANT 21: note = Any amino acid
  VARIANT 22: note = Any amino acid
  VARIANT 23: note = Any amino acid
  VARIANT 24: note = Any amino acid
  VARIANT 25: note = Any amino acid
  VARIANT 26: note = Any amino acid
  VARIANT 27: note = Any amino acid
  VARIANT 28: note = Any amino acid
  VARIANT 29: note = Any amino acid
  VARIANT 30: note = Any amino acid
  VARIANT 32: note = Any amino acid
  VARIANT 33: note = Any amino acid
  VARIANT 34: note = Any amino acid
  VARIANT 35: note = Any amino acid
  VARIANT 36: note = Any amino acid
  VARIANT 37: note = Any amino acid
  VARIANT 38: note = Any amino acid
  VARIANT 41: note = Any amino acid
  VARIANT 42: note = Any amino acid
  VARIANT 43: note = Any amino acid
  VARIANT 44: note = Any amino acid
  VARIANT 45: note = Any amino acid
  VARIANT 46: note = Any amino acid
  VARIANT 47: note = Any amino acid
  VARIANT 48: note = Any amino acid
  VARIANT 49: note = Any amino acid
GXXXXXXXXXXXXXXXXXXXXXXXXXXXXXGXXXXXXXSGXXXXXXXXXG

SEQ ID NO: 797251 - protein, 51 aa, unidentified
  VARIANT 2: note = Any amino acid
  VARIANT 3: note = Any amino acid
  VARIANT 4: note = Any amino acid
  VARIANT 5: note = Any amino acid
  VARIANT 6: note = Any amino acid
  VARIANT 7: note = Any amino acid
  VARIANT 8: note = Any amino acid
  VARIANT 9: note = Any amino acid
  VARIANT 10: note = Any amino acid
  VARIANT 11: note = Any amino acid
  VARIANT 12: note = Any amino acid
  VARIANT 13: note = Any amino acid
  VARIANT 14: note = Any amino acid
  VARIANT 15: note = Any amino acid
  VARIANT 16: note = Any amino acid
  VARIANT 17: note = Any amino acid
  VARIANT 18: note = Any amino acid
  VARIANT 19: note = Any amino acid
  VARIANT 20: note = Any amino acid
  VARIANT 21: note = Any amino acid
  VARIANT 22: note = Any amino acid
  VARIANT 23: note = Any amino acid
  VARIANT 24: note = Any amino acid
  VARIANT 25: note = Any amino acid
  VARIANT 26: note = Any amino acid
  VARIANT 27: note = Any amino acid
  VARIANT 28: note = Any amino acid
  VARIANT 29: note = Any amino acid
  VARIANT 30: note = Any amino acid
  VARIANT 32: note = Any amino acid
  VARIANT 33: note = Any amino acid
  VARIANT 34: note = Any amino acid
  VARIANT 35: note = Any amino acid
  VARIANT 36: note = Any amino acid
  VARIANT 37: note = Any amino acid
  VARIANT 38: note = Any amino acid
  VARIANT 41: note = Any amino acid
  VARIANT 42: note = Any amino acid
  VARIANT 43: note = Any amino acid
  VARIANT 44: note = Any amino acid
  VARIANT 45: note = Any amino acid
  VARIANT 46: note = Any amino acid
  VARIANT 47: note = Any amino acid
  VARIANT 48: note = Any amino acid
  VARIANT 49: note = Any amino acid
  VARIANT 50: note = Any amino acid
GXXXXXXXXXXXXXXXXXXXXXXXXXXXXXGXXXXXXXSGXXXXXXXXXXR

SEQ ID NO: 797252 - protein, 52 aa, unidentified
  VARIANT 2: note = Any amino acid
  VARIANT 3: note = Any amino acid
  VARIANT 4: note = Any amino acid
  VARIANT 5: note = Any amino acid
  VARIANT 6: note = Any amino acid
  VARIANT 7: note = Any amino acid
  VARIANT 8: note = Any amino acid
  VARIANT 9: note = Any amino acid
  VARIANT 10: note = Any amino acid
  VARIANT 11: note = Any amino acid
  VARIANT 12: note = Any amino acid
  VARIANT 13: note = Any amino acid
  VARIANT 14: note = Any amino acid
  VARIANT 15: note = Any amino acid
  VARIANT 16: note = Any amino acid
  VARIANT 17: note = Any amino acid
  VARIANT 18: note = Any amino acid
  VARIANT 19: note = Any amino acid
  VARIANT 20: note = Any amino acid
  VARIANT 21: note = Any amino acid
  VARIANT 22: note = Any amino acid
  VARIANT 23: note = Any amino acid
  VARIANT 24: note = Any amino acid
  VARIANT 25: note = Any amino acid
  VARIANT 26: note = Any amino acid
  VARIANT 27: note = Any amino acid
  VARIANT 28: note = Any amino acid
  VARIANT 29: note = Any amino acid
  VARIANT 30: note = Any amino acid
  VARIANT 31: note = Any amino acid
  VARIANT 33: note = Any amino acid
  VARIANT 34: note = Any amino acid
  VARIANT 35: note = Any amino acid
  VARIANT 36: note = Any amino acid
  VARIANT 37: note = Any amino acid
  VARIANT 38: note = Any amino acid
  VARIANT 39: note = Any amino acid
  VARIANT 42: note = Any amino acid
  VARIANT 43: note = Any amino acid
  VARIANT 44: note = Any amino acid
  VARIANT 45: note = Any amino acid
  VARIANT 46: note = Any amino acid
  VARIANT 47: note = Any amino acid
  VARIANT 48: note = Any amino acid
  VARIANT 49: note = Any amino acid
  VARIANT 50: note = Any amino acid
  VARIANT 51: note = Any amino acid
GXXXXXXXXXXXXXXXXXXXXXXXXXXXXXXGXXXXXXXSAXXXXXXXXXXT

SEQ ID NO: 797253 - protein, 54 aa, unidentified
  VARIANT 2: note = Any amino acid
  VARIANT 3: note = Any amino acid
  VARIANT 4: note = Any amino acid
  VARIANT 5: note = Any amino acid
  VARIANT 6: note = Any amino acid
  VARIANT 7: note = Any amino acid
  VARIANT 8: note = Any amino acid
  VARIANT 9: note = Any amino acid
  VARIANT 10: note = Any amino acid
  VARIANT 11: note = Any amino acid
  VARIANT 12: note = Any amino acid
  VARIANT 13: note = Any amino acid
  VARIANT 14: note = Any amino acid
  VARIANT 15: note = Any amino acid
  VARIANT 16: note = Any amino acid
  VARIANT 17: note = Any amino acid
  VARIANT 18: note = Any amino acid
  VARIANT 19: note = Any amino acid
  VARIANT 20: note = Any amino acid
  VARIANT 21: note = Any amino acid
  VARIANT 22: note = Any amino acid
  VARIANT 23: note = Any amino acid
  VARIANT 24: note = Any amino acid
  VARIANT 25: note = Any amino acid
  VARIANT 26: note = Any amino acid
  VARIANT 27: note = Any amino acid
  VARIANT 28: note = Any amino acid
  VARIANT 29: note = Any amino acid
  VARIANT 30: note = Any amino acid
  VARIANT 31: note = Any amino acid
  VARIANT 33: note = Any amino acid
  VARIANT 34: note = Any amino acid
  VARIANT 35: note = Any amino acid
  VARIANT 36: note = Any amino acid
  VARIANT 37: note = Any amino acid
  VARIANT 38: note = Any amino acid
  VARIANT 39: note = Any amino acid
  VARIANT 42: note = Any amino acid
  VARIANT 43: note = Any amino acid
  VARIANT 44: note = Any amino acid
  VARIANT 45: note = Any amino acid
  VARIANT 46: note = Any amino acid
  VARIANT 47: note = Any amino acid
  VARIANT 48: note = Any amino acid
  VARIANT 49: note = Any amino acid
  VARIANT 50: note = Any amino acid
  VARIANT 51: note = Any amino acid
  VARIANT 52: note = Any amino acid
  VARIANT 53: note = Any amino acid
GXXXXXXXXXXXXXXXXXXXXXXXXXXXXXXGXXXXXXXSGXXXXXXXXXXXXC

SEQ ID NO: 797254 - protein, 52 aa, unidentified
  VARIANT 2: note = Any amino acid
  VARIANT 3: note = Any amino acid
  VARIANT 4: note = Any amino acid
  VARIANT 5: note = Any amino acid
  VARIANT 6: note = Any amino acid
  VARIANT 7: note = Any amino acid
  VARIANT 8: note = Any amino acid
  VARIANT 9: note = Any amino acid
  VARIANT 10: note = Any amino acid
  VARIANT 11: note = Any amino acid
  VARIANT 12: note = Any amino acid
  VARIANT 13: note = Any amino acid
  VARIANT 14: note = Any amino acid
  VARIANT 15: note = Any amino acid
  VARIANT 16: note = Any amino acid
  VARIANT 17: note = Any amino acid
  VARIANT 18: note = Any amino acid
  VARIANT 19: note = Any amino acid
  VARIANT 20: note = Any amino acid
  VARIANT 21: note = Any amino acid
  VARIANT 22: note = Any amino acid
  VARIANT 23: note = Any amino acid
  VARIANT 24: note = Any amino acid
  VARIANT 25: note = Any amino acid
  VARIANT 26: note = Any amino acid
  VARIANT 27: note = Any amino acid
  VARIANT 28: note = Any amino acid
  VARIANT 29: note = Any amino acid
  VARIANT 30: note = Any amino acid
  VARIANT 32: note = Any amino acid
  VARIANT 33: note = Any amino acid
  VARIANT 34: note = Any amino acid
  VARIANT 35: note = Any amino acid
  VARIANT 36: note = Any amino acid
  VARIANT 37: note = Any amino acid
  VARIANT 38: note = Any amino acid
  VARIANT 41: note = Any amino acid
  VARIANT 42: note = Any amino acid
  VARIANT 43: note = Any amino acid
  VARIANT 44: note = Any amino acid
  VARIANT 45: note = Any amino acid
  VARIANT 46: note = Any amino acid
  VARIANT 47: note = Any amino acid
  VARIANT 48: note = Any amino acid
  VARIANT 49: note = Any amino acid
  VARIANT 50: note = Any amino acid
  VARIANT 51: note = Any amino acid
NXXXXXXXXXXXXXXXXXXXXXXXXXXXXXGXXXXXXXSGXXXXXXXXXXXG

SEQ ID NO: 797255 - protein, 52 aa, unidentified
  VARIANT 2: note = Any amino acid
  VARIANT 3: note = Any amino acid
  VARIANT 4: note = Any amino acid
  VARIANT 5: note = Any amino acid
  VARIANT 6: note = Any amino acid
  VARIANT 7: note = Any amino acid
  VARIANT 8: note = Any amino acid
  VARIANT 9: note = Any amino acid
  VARIANT 10: note = Any amino acid
  VARIANT 11: note = Any amino acid
  VARIANT 12: note = Any amino acid
  VARIANT 13: note = Any amino acid
  VARIANT 14: note = Any amino acid
  VARIANT 15: note = Any amino acid
  VARIANT 16: note = Any amino acid
  VARIANT 17: note = Any amino acid
  VARIANT 18: note = Any amino acid
  VARIANT 19: note = Any amino acid
  VARIANT 20: note = Any amino acid
  VARIANT 21: note = Any amino acid
  VARIANT 22: note = Any amino acid
  VARIANT 23: note = Any amino acid
  VARIANT 24: note = Any amino acid
  VARIANT 25: note = Any amino acid
  VARIANT 26: note = Any amino acid
  VARIANT 27: note = Any amino acid
  VARIANT 28: note = Any amino acid
  VARIANT 29: note = Any amino acid
  VARIANT 30: note = Any amino acid
  VARIANT 31: note = Any amino acid
  VARIANT 33: note = Any amino acid
  VARIANT 34: note = Any amino acid
  VARIANT 35: note = Any amino acid
  VARIANT 36: note = Any amino acid
  VARIANT 37: note = Any amino acid
  VARIANT 38: note = Any amino acid
  VARIANT 39: note = Any amino acid
  VARIANT 42: note = Any amino acid
  VARIANT 43: note = Any amino acid
  VARIANT 44: note = Any amino acid
  VARIANT 45: note = Any amino acid
  VARIANT 46: note = Any amino acid
  VARIANT 47: note = Any amino acid
  VARIANT 48: note = Any amino acid
  VARIANT 49: note = Any amino acid
  VARIANT 50: note = Any amino acid
  VARIANT 51: note = Any amino acid
GXXXXXXXXXXXXXXXXXXXXXXXXXXXXXXEXXXXXXXTGXXXXXXXXXXS

SEQ ID NO: 797256 - protein, 53 aa, unidentified
  VARIANT 2: note = Any amino acid
  VARIANT 3: note = Any amino acid
  VARIANT 4: note = Any amino acid
  VARIANT 5: note = Any amino acid
  VARIANT 6: note = Any amino acid
  VARIANT 7: note = Any amino acid
  VARIANT 8: note = Any amino acid
  VARIANT 9: note = Any amino acid
  VARIANT 10: note = Any amino acid
  VARIANT 11: note = Any amino acid
  VARIANT 12: note = Any amino acid
  VARIANT 13: note = Any amino acid
  VARIANT 14: note = Any amino acid
  VARIANT 15: note = Any amino acid
  VARIANT 16: note = Any amino acid
  VARIANT 17: note = Any amino acid
  VARIANT 18: note = Any amino acid
  VARIANT 19: note = Any amino acid
  VARIANT 20: note = Any amino acid
  VARIANT 21: note = Any amino acid
  VARIANT 22: note = Any amino acid
  VARIANT 23: note = Any amino acid
  VARIANT 24: note = Any amino acid
  VARIANT 25: note = Any amino acid
  VARIANT 26: note = Any amino acid
  VARIANT 27: note = Any amino acid
  VARIANT 28: note = Any amino acid
  VARIANT 29: note = Any amino acid
  VARIANT 30: note = Any amino acid
  VARIANT 31: note = Any amino acid
  VARIANT 33: note = Any amino acid
  VARIANT 34: note = Any amino acid
  VARIANT 35: note = Any amino acid
  VARIANT 36: note = Any amino acid
  VARIANT 37: note = Any amino acid
  VARIANT 38: note = Any amino acid
  VARIANT 39: note = Any amino acid
  VARIANT 42: note = Any amino acid
  VARIANT 43: note = Any amino acid
  VARIANT 44: note = Any amino acid
  VARIANT 45: note = Any amino acid
  VARIANT 46: note = Any amino acid
  VARIANT 47: note = Any amino acid
  VARIANT 48: note = Any amino acid
  VARIANT 49: note = Any amino acid
  VARIANT 50: note = Any amino acid
  VARIANT 51: note = Any amino acid
  VARIANT 52: note = Any amino acid
GXXXXXXXXXXXXXXXXXXXXXXXXXXXXXXKXXXXXXXSGXXXXXXXXXXXG

SEQ ID NO: 797257 - protein, 53 aa, unidentified
  VARIANT 2: note = Any amino acid
  VARIANT 3: note = Any amino acid
  VARIANT 4: note = Any amino acid
  VARIANT 5: note = Any amino acid
  VARIANT 6: note = Any amino acid
  VARIANT 7: note = Any amino acid
  VARIANT 8: note = Any amino acid
  VARIANT 9: note = Any amino acid
  VARIANT 10: note = Any amino acid
  VARIANT 11: note = Any amino acid
  VARIANT 12: note = Any amino acid
  VARIANT 13: note = Any amino acid
  VARIANT 14: note = Any amino acid
  VARIANT 15: note = Any amino acid
  VARIANT 16: note = Any amino acid
  VARIANT 17: note = Any amino acid
  VARIANT 18: note = Any amino acid
  VARIANT 19: note = Any amino acid
  VARIANT 20: note = Any amino acid
  VARIANT 21: note = Any amino acid
  VARIANT 22: note = Any amino acid
  VARIANT 23: note = Any amino acid
  VARIANT 24: note = Any amino acid
  VARIANT 25: note = Any amino acid
  VARIANT 26: note = Any amino acid
  VARIANT 27: note = Any amino acid
  VARIANT 28: note = Any amino acid
  VARIANT 29: note = Any amino acid
  VARIANT 30: note = Any amino acid
  VARIANT 32: note = Any amino acid
  VARIANT 33: note = Any amino acid
  VARIANT 34: note = Any amino acid
  VARIANT 35: note = Any amino acid
  VARIANT 36: note = Any amino acid
  VARIANT 37: note = Any amino acid
  VARIANT 38: note = Any amino acid
  VARIANT 41: note = Any amino acid
  VARIANT 42: note = Any amino acid
  VARIANT 43: note = Any amino acid
  VARIANT 44: note = Any amino acid
  VARIANT 45: note = Any amino acid
  VARIANT 46: note = Any amino acid
  VARIANT 47: note = Any amino acid
  VARIANT 48: note = Any amino acid
  VARIANT 49: note = Any amino acid
  VARIANT 50: note = Any amino acid
  VARIANT 51: note = Any amino acid
  VARIANT 52: note = Any amino acid
GXXXXXXXXXXXXXXXXXXXXXXXXXXXXXGXXXXXXXTGXXXXXXXXXXXXC

SEQ ID NO: 797258 - protein, 51 aa, unidentified
  VARIANT 2: note = Any amino acid
  VARIANT 3: note = Any amino acid
  VARIANT 4: note = Any amino acid
  VARIANT 5: note = Any amino acid
  VARIANT 6: note = Any amino acid
  VARIANT 7: note = Any amino acid
  VARIANT 8: note = Any amino acid
  VARIANT 9: note = Any amino acid
  VARIANT 10: note = Any amino acid
  VARIANT 11: note = Any amino acid
  VARIANT 12: note = Any amino acid
  VARIANT 13: note = Any amino acid
  VARIANT 14: note = Any amino acid
  VARIANT 15: note = Any amino acid
  VARIANT 16: note = Any amino acid
  VARIANT 17: note = Any amino acid
  VARIANT 18: note = Any amino acid
  VARIANT 19: note = Any amino acid
  VARIANT 20: note = Any amino acid
  VARIANT 21: note = Any amino acid
  VARIANT 22: note = Any amino acid
  VARIANT 23: note = Any amino acid
  VARIANT 24: note = Any amino acid
  VARIANT 25: note = Any amino acid
  VARIANT 26: note = Any amino acid
  VARIANT 27: note = Any amino acid
  VARIANT 28: note = Any amino acid
  VARIANT 29: note = Any amino acid
  VARIANT 30: note = Any amino acid
  VARIANT 31: note = Any amino acid
  VARIANT 33: note = Any amino acid
  VARIANT 34: note = Any amino acid
  VARIANT 35: note = Any amino acid
  VARIANT 36: note = Any amino acid
  VARIANT 37: note = Any amino acid
  VARIANT 38: note = Any amino acid
  VARIANT 39: note = Any amino acid
  VARIANT 42: note = Any amino acid
  VARIANT 43: note = Any amino acid
  VARIANT 44: note = Any amino acid
  VARIANT 45: note = Any amino acid
  VARIANT 46: note = Any amino acid
  VARIANT 47: note = Any amino acid
  VARIANT 48: note = Any amino acid
  VARIANT 49: note = Any amino acid
  VARIANT 50: note = Any amino acid
GXXXXXXXXXXXXXXXXXXXXXXXXXXXXXXGXXXXXXXSGXXXXXXXXXA

SEQ ID NO: 797259 - protein, 52 aa, unidentified
  VARIANT 2: note = Any amino acid
  VARIANT 3: note = Any amino acid
  VARIANT 4: note = Any amino acid
  VARIANT 5: note = Any amino acid
  VARIANT 6: note = Any amino acid
  VARIANT 7: note = Any amino acid
  VARIANT 8: note = Any amino acid
  VARIANT 9: note = Any amino acid
  VARIANT 10: note = Any amino acid
  VARIANT 11: note = Any amino acid
  VARIANT 12: note = Any amino acid
  VARIANT 13: note = Any amino acid
  VARIANT 14: note = Any amino acid
  VARIANT 15: note = Any amino acid
  VARIANT 16: note = Any amino acid
  VARIANT 17: note = Any amino acid
  VARIANT 18: note = Any amino acid
  VARIANT 19: note = Any amino acid
  VARIANT 20: note = Any amino acid
  VARIANT 21: note = Any amino acid
  VARIANT 22: note = Any amino acid
  VARIANT 23: note = Any amino acid
  VARIANT 24: note = Any amino acid
  VARIANT 25: note = Any amino acid
  VARIANT 26: note = Any amino acid
  VARIANT 27: note = Any amino acid
  VARIANT 28: note = Any amino acid
  VARIANT 29: note = Any amino acid
  VARIANT 30: note = Any amino acid
  VARIANT 31: note = Any amino acid
  VARIANT 33: note = Any amino acid
  VARIANT 34: note = Any amino acid
  VARIANT 35: note = Any amino acid
  VARIANT 36: note = Any amino acid
  VARIANT 37: note = Any amino acid
  VARIANT 38: note = Any amino acid
  VARIANT 39: note = Any amino acid
  VARIANT 42: note = Any amino acid
  VARIANT 43: note = Any amino acid
  VARIANT 44: note = Any amino acid
  VARIANT 45: note = Any amino acid
  VARIANT 46: note = Any amino acid
  VARIANT 47: note = Any amino acid
  VARIANT 48: note = Any amino acid
  VARIANT 49: note = Any amino acid
  VARIANT 50: note = Any amino acid
  VARIANT 51: note = Any amino acid
GXXXXXXXXXXXXXXXXXXXXXXXXXXXXXXGXXXXXXXSGXXXXXXXXXXI

SEQ ID NO: 797260 - protein, 52 aa, unidentified
  VARIANT 2: note = Any amino acid
  VARIANT 3: note = Any amino acid
  VARIANT 4: note = Any amino acid
  VARIANT 5: note = Any amino acid
  VARIANT 6: note = Any amino acid
  VARIANT 7: note = Any amino acid
  VARIANT 8: note = Any amino acid
  VARIANT 9: note = Any amino acid
  VARIANT 10: note = Any amino acid
  VARIANT 11: note = Any amino acid
  VARIANT 12: note = Any amino acid
  VARIANT 13: note = Any amino acid
  VARIANT 14: note = Any amino acid
  VARIANT 15: note = Any amino acid
  VARIANT 16: note = Any amino acid
  VARIANT 17: note = Any amino acid
  VARIANT 18: note = Any amino acid
  VARIANT 19: note = Any amino acid
  VARIANT 20: note = Any amino acid
  VARIANT 21: note = Any amino acid
  VARIANT 22: note = Any amino acid
  VARIANT 23: note = Any amino acid
  VARIANT 24: note = Any amino acid
  VARIANT 25: note = Any amino acid
  VARIANT 26: note = Any amino acid
  VARIANT 27: note = Any amino acid
  VARIANT 28: note = Any amino acid
  VARIANT 29: note = Any amino acid
  VARIANT 30: note = Any amino acid
  VARIANT 31: note = Any amino acid
  VARIANT 33: note = Any amino acid
  VARIANT 34: note = Any amino acid
  VARIANT 35: note = Any amino acid
  VARIANT 36: note = Any amino acid
  VARIANT 37: note = Any amino acid
  VARIANT 38: note = Any amino acid
  VARIANT 39: note = Any amino acid
  VARIANT 42: note = Any amino acid
  VARIANT 43: note = Any amino acid
  VARIANT 44: note = Any amino acid
  VARIANT 45: note = Any amino acid
  VARIANT 46: note = Any amino acid
  VARIANT 47: note = Any amino acid
  VARIANT 48: note = Any amino acid
  VARIANT 49: note = Any amino acid
  VARIANT 50: note = Any amino acid
  VARIANT 51: note = Any amino acid
GXXXXXXXXXXXXXXXXXXXXXXXXXXXXXXAXXXXXXXSGXXXXXXXXXXS

SEQ ID NO: 797261 - protein, 52 aa, unidentified
  VARIANT 2: note = Any amino acid
  VARIANT 3: note = Any amino acid
  VARIANT 4: note = Any amino acid
  VARIANT 5: note = Any amino acid
  VARIANT 6: note = Any amino acid
  VARIANT 7: note = Any amino acid
  VARIANT 8: note = Any amino acid
  VARIANT 9: note = Any amino acid
  VARIANT 10: note = Any amino acid
  VARIANT 11: note = Any amino acid
  VARIANT 12: note = Any amino acid
  VARIANT 13: note = Any amino acid
  VARIANT 14: note = Any amino acid
  VARIANT 15: note = Any amino acid
  VARIANT 16: note = Any amino acid
  VARIANT 17: note = Any amino acid
  VARIANT 18: note = Any amino acid
  VARIANT 19: note = Any amino acid
  VARIANT 20: note = Any amino acid
  VARIANT 21: note = Any amino acid
  VARIANT 22: note = Any amino acid
  VARIANT 23: note = Any amino acid
  VARIANT 24: note = Any amino acid
  VARIANT 25: note = Any amino acid
  VARIANT 26: note = Any amino acid
  VARIANT 27: note = Any amino acid
  VARIANT 28: note = Any amino acid
  VARIANT 29: note = Any amino acid
  VARIANT 30: note = Any amino acid
  VARIANT 31: note = Any amino acid
  VARIANT 33: note = Any amino acid
  VARIANT 34: note = Any amino acid
  VARIANT 35: note = Any amino acid
  VARIANT 36: note = Any amino acid
  VARIANT 37: note = Any amino acid
  VARIANT 38: note = Any amino acid
  VARIANT 39: note = Any amino acid
  VARIANT 42: note = Any amino acid
  VARIANT 43: note = Any amino acid
  VARIANT 44: note = Any amino acid
  VARIANT 45: note = Any amino acid
  VARIANT 46: note = Any amino acid
  VARIANT 47: note = Any amino acid
  VARIANT 48: note = Any amino acid
  VARIANT 49: note = Any amino acid
  VARIANT 50: note = Any amino acid
  VARIANT 51: note = Any amino acid
GXXXXXXXXXXXXXXXXXXXXXXXXXXXXXXRXXXXXXXSNXXXXXXXXXXG

SEQ ID NO: 797262 - protein, 52 aa, unidentified
  VARIANT 2: note = Any amino acid
  VARIANT 3: note = Any amino acid
  VARIANT 4: note = Any amino acid
  VARIANT 5: note = Any amino acid
  VARIANT 6: note = Any amino acid
  VARIANT 7: note = Any amino acid
  VARIANT 8: note = Any amino acid
  VARIANT 9: note = Any amino acid
  VARIANT 10: note = Any amino acid
  VARIANT 11: note = Any amino acid
  VARIANT 12: note = Any amino acid
  VARIANT 13: note = Any amino acid
  VARIANT 14: note = Any amino acid
  VARIANT 15: note = Any amino acid
  VARIANT 16: note = Any amino acid
  VARIANT 17: note = Any amino acid
  VARIANT 18: note = Any amino acid
  VARIANT 19: note = Any amino acid
  VARIANT 20: note = Any amino acid
  VARIANT 21: note = Any amino acid
  VARIANT 22: note = Any amino acid
  VARIANT 23: note = Any amino acid
  VARIANT 24: note = Any amino acid
  VARIANT 25: note = Any amino acid
  VARIANT 26: note = Any amino acid
  VARIANT 27: note = Any amino acid
  VARIANT 28: note = Any amino acid
  VARIANT 29: note = Any amino acid
  VARIANT 30: note = Any amino acid
  VARIANT 31: note = Any amino acid
  VARIANT 33: note = Any amino acid
  VARIANT 34: note = Any amino acid
  VARIANT 35: note = Any amino acid
  VARIANT 36: note = Any amino acid
  VARIANT 37: note = Any amino acid
  VARIANT 38: note = Any amino acid
  VARIANT 39: note = Any amino acid
  VARIANT 42: note = Any amino acid
  VARIANT 43: note = Any amino acid
  VARIANT 44: note = Any amino acid
  VARIANT 45: note = Any amino acid
  VARIANT 46: note = Any amino acid
  VARIANT 47: note = Any amino acid
  VARIANT 48: note = Any amino acid
  VARIANT 49: note = Any amino acid
  VARIANT 50: note = Any amino acid
  VARIANT 51: note = Any amino acid
GXXXXXXXXXXXXXXXXXXXXXXXXXXXXXXSXXXXXXXSAXXXXXXXXXXG

SEQ ID NO: 797263 - protein, 52 aa, unidentified
  VARIANT 2: note = Any amino acid
  VARIANT 3: note = Any amino acid
  VARIANT 4: note = Any amino acid
  VARIANT 5: note = Any amino acid
  VARIANT 6: note = Any amino acid
  VARIANT 7: note = Any amino acid
  VARIANT 8: note = Any amino acid
  VARIANT 9: note = Any amino acid
  VARIANT 10: note = Any amino acid
  VARIANT 11: note = Any amino acid
  VARIANT 12: note = Any amino acid
  VARIANT 13: note = Any amino acid
  VARIANT 14: note = Any amino acid
  VARIANT 15: note = Any amino acid
  VARIANT 16: note = Any amino acid
  VARIANT 17: note = Any amino acid
  VARIANT 18: note = Any amino acid
  VARIANT 19: note = Any amino acid
  VARIANT 20: note = Any amino acid
  VARIANT 21: note = Any amino acid
  VARIANT 22: note = Any amino acid
  VARIANT 23: note = Any amino acid
  VARIANT 24: note = Any amino acid
  VARIANT 25: note = Any amino acid
  VARIANT 26: note = Any amino acid
  VARIANT 27: note = Any amino acid
  VARIANT 28: note = Any amino acid
  VARIANT 29: note = Any amino acid
  VARIANT 30: note = Any amino acid
  VARIANT 31: note = Any amino acid
  VARIANT 33: note = Any amino acid
  VARIANT 34: note = Any amino acid
  VARIANT 35: note = Any amino acid
  VARIANT 36: note = Any amino acid
  VARIANT 37: note = Any amino acid
  VARIANT 38: note = Any amino acid
  VARIANT 39: note = Any amino acid
  VARIANT 42: note = Any amino acid
  VARIANT 43: note = Any amino acid
  VARIANT 44: note = Any amino acid
  VARIANT 45: note = Any amino acid
  VARIANT 46: note = Any amino acid
  VARIANT 47: note = Any amino acid
  VARIANT 48: note = Any amino acid
  VARIANT 49: note = Any amino acid
  VARIANT 50: note = Any amino acid
  VARIANT 51: note = Any amino acid
GXXXXXXXXXXXXXXXXXXXXXXXXXXXXXXSXXXXXXXSGXXXXXXXXXXG

SEQ ID NO: 797264 - protein, 56 aa, unidentified
  VARIANT 2: note = Any amino acid
  VARIANT 3: note = Any amino acid
  VARIANT 4: note = Any amino acid
  VARIANT 5: note = Any amino acid
  VARIANT 6: note = Any amino acid
  VARIANT 7: note = Any amino acid
  VARIANT 8: note = Any amino acid
  VARIANT 9: note = Any amino acid
  VARIANT 10: note = Any amino acid
  VARIANT 11: note = Any amino acid
  VARIANT 12: note = Any amino acid
  VARIANT 13: note = Any amino acid
  VARIANT 14: note = Any amino acid
  VARIANT 15: note = Any amino acid
  VARIANT 16: note = Any amino acid
  VARIANT 17: note = Any amino acid
  VARIANT 18: note = Any amino acid
  VARIANT 19: note = Any amino acid
  VARIANT 20: note = Any amino acid
  VARIANT 21: note = Any amino acid
  VARIANT 22: note = Any amino acid
  VARIANT 23: note = Any amino acid
  VARIANT 24: note = Any amino acid
  VARIANT 25: note = Any amino acid
  VARIANT 26: note = Any amino acid
  VARIANT 27: note = Any amino acid
  VARIANT 28: note = Any amino acid
  VARIANT 29: note = Any amino acid
  VARIANT 30: note = Any amino acid
  VARIANT 31: note = Any amino acid
  VARIANT 32: note = Any amino acid
  VARIANT 33: note = Any amino acid
  VARIANT 34: note = Any amino acid
  VARIANT 36: note = Any amino acid
  VARIANT 37: note = Any amino acid
  VARIANT 38: note = Any amino acid
  VARIANT 39: note = Any amino acid
  VARIANT 40: note = Any amino acid
  VARIANT 41: note = Any amino acid
  VARIANT 42: note = Any amino acid
  VARIANT 45: note = Any amino acid
  VARIANT 46: note = Any amino acid
  VARIANT 47: note = Any amino acid
  VARIANT 48: note = Any amino acid
  VARIANT 49: note = Any amino acid
  VARIANT 50: note = Any amino acid
  VARIANT 51: note = Any amino acid
  VARIANT 52: note = Any amino acid
  VARIANT 53: note = Any amino acid
  VARIANT 54: note = Any amino acid
  VARIANT 55: note = Any amino acid
GXXXXXXXXXXXXXXXXXXXXXXXXXXXXXXXXXGXXXXXXXSGXXXXXXXXXXXG

SEQ ID NO: 797265 - protein, 52 aa, unidentified
  VARIANT 2: note = Any amino acid
  VARIANT 3: note = Any amino acid
  VARIANT 4: note = Any amino acid
  VARIANT 5: note = Any amino acid
  VARIANT 6: note = Any amino acid
  VARIANT 7: note = Any amino acid
  VARIANT 8: note = Any amino acid
  VARIANT 9: note = Any amino acid
  VARIANT 10: note = Any amino acid
  VARIANT 11: note = Any amino acid
  VARIANT 12: note = Any amino acid
  VARIANT 13: note = Any amino acid
  VARIANT 14: note = Any amino acid
  VARIANT 15: note = Any amino acid
  VARIANT 16: note = Any amino acid
  VARIANT 17: note = Any amino acid
  VARIANT 18: note = Any amino acid
  VARIANT 19: note = Any amino acid
  VARIANT 20: note = Any amino acid
  VARIANT 21: note = Any amino acid
  VARIANT 22: note = Any amino acid
  VARIANT 23: note = Any amino acid
  VARIANT 24: note = Any amino acid
  VARIANT 25: note = Any amino acid
  VARIANT 26: note = Any amino acid
  VARIANT 27: note = Any amino acid
  VARIANT 28: note = Any amino acid
  VARIANT 29: note = Any amino acid
  VARIANT 30: note = Any amino acid
  VARIANT 31: note = Any amino acid
  VARIANT 33: note = Any amino acid
  VARIANT 34: note = Any amino acid
  VARIANT 35: note = Any amino acid
  VARIANT 36: note = Any amino acid
  VARIANT 37: note = Any amino acid
  VARIANT 38: note = Any amino acid
  VARIANT 39: note = Any amino acid
  VARIANT 42: note = Any amino acid
  VARIANT 43: note = Any amino acid
  VARIANT 44: note = Any amino acid
  VARIANT 45: note = Any amino acid
  VARIANT 46: note = Any amino acid
  VARIANT 47: note = Any amino acid
  VARIANT 48: note = Any amino acid
  VARIANT 49: note = Any amino acid
  VARIANT 50: note = Any amino acid
  VARIANT 51: note = Any amino acid
SXXXXXXXXXXXXXXXXXXXXXXXXXXXXXXGXXXXXXXSAXXXXXXXXXXG

SEQ ID NO: 797266 - protein, 52 aa, unidentified
  VARIANT 2: note = Any amino acid
  VARIANT 3: note = Any amino acid
  VARIANT 4: note = Any amino acid
  VARIANT 5: note = Any amino acid
  VARIANT 6: note = Any amino acid
  VARIANT 7: note = Any amino acid
  VARIANT 8: note = Any amino acid
  VARIANT 9: note = Any amino acid
  VARIANT 10: note = Any amino acid
  VARIANT 11: note = Any amino acid
  VARIANT 12: note = Any amino acid
  VARIANT 13: note = Any amino acid
  VARIANT 14: note = Any amino acid
  VARIANT 15: note = Any amino acid
  VARIANT 16: note = Any amino acid
  VARIANT 17: note = Any amino acid
  VARIANT 18: note = Any amino acid
  VARIANT 19: note = Any amino acid
  VARIANT 20: note = Any amino acid
  VARIANT 21: note = Any amino acid
  VARIANT 22: note = Any amino acid
  VARIANT 23: note = Any amino acid
  VARIANT 24: note = Any amino acid
  VARIANT 25: note = Any amino acid
  VARIANT 26: note = Any amino acid
  VARIANT 27: note = Any amino acid
  VARIANT 28: note = Any amino acid
  VARIANT 29: note = Any amino acid
  VARIANT 30: note = Any amino acid
  VARIANT 31: note = Any amino acid
  VARIANT 33: note = Any amino acid
  VARIANT 34: note = Any amino acid
  VARIANT 35: note = Any amino acid
  VARIANT 36: note = Any amino acid
  VARIANT 37: note = Any amino acid
  VARIANT 38: note = Any amino acid
  VARIANT 39: note = Any amino acid
  VARIANT 42: note = Any amino acid
  VARIANT 43: note = Any amino acid
  VARIANT 44: note = Any amino acid
  VARIANT 45: note = Any amino acid
  VARIANT 46: note = Any amino acid
  VARIANT 47: note = Any amino acid
  VARIANT 48: note = Any amino acid
  VARIANT 49: note = Any amino acid
  VARIANT 50: note = Any amino acid
  VARIANT 51: note = Any amino acid
SXXXXXXXXXXXXXXXXXXXXXXXXXXXXXXGXXXXXXXSGXXXXXXXXXXV

SEQ ID NO: 797267 - protein, 52 aa, unidentified
  VARIANT 2: note = Any amino acid
  VARIANT 3: note = Any amino acid
  VARIANT 4: note = Any amino acid
  VARIANT 5: note = Any amino acid
  VARIANT 6: note = Any amino acid
  VARIANT 7: note = Any amino acid
  VARIANT 8: note = Any amino acid
  VARIANT 9: note = Any amino acid
  VARIANT 10: note = Any amino acid
  VARIANT 11: note = Any amino acid
  VARIANT 12: note = Any amino acid
  VARIANT 13: note = Any amino acid
  VARIANT 14: note = Any amino acid
  VARIANT 15: note = Any amino acid
  VARIANT 16: note = Any amino acid
  VARIANT 17: note = Any amino acid
  VARIANT 18: note = Any amino acid
  VARIANT 19: note = Any amino acid
  VARIANT 20: note = Any amino acid
  VARIANT 21: note = Any amino acid
  VARIANT 22: note = Any amino acid
  VARIANT 23: note = Any amino acid
  VARIANT 24: note = Any amino acid
  VARIANT 25: note = Any amino acid
  VARIANT 26: note = Any amino acid
  VARIANT 27: note = Any amino acid
  VARIANT 28: note = Any amino acid
  VARIANT 29: note = Any amino acid
  VARIANT 30: note = Any amino acid
  VARIANT 31: note = Any amino acid
  VARIANT 33: note = Any amino acid
  VARIANT 34: note = Any amino acid
  VARIANT 35: note = Any amino acid
  VARIANT 36: note = Any amino acid
  VARIANT 37: note = Any amino acid
  VARIANT 38: note = Any amino acid
  VARIANT 39: note = Any amino acid
  VARIANT 42: note = Any amino acid
  VARIANT 43: note = Any amino acid
  VARIANT 44: note = Any amino acid
  VARIANT 45: note = Any amino acid
  VARIANT 46: note = Any amino acid
  VARIANT 47: note = Any amino acid
  VARIANT 48: note = Any amino acid
  VARIANT 49: note = Any amino acid
  VARIANT 50: note = Any amino acid
  VARIANT 51: note = Any amino acid
GXXXXXXXXXXXXXXXXXXXXXXXXXXXXXXGXXXXXXXSSXXXXXXXXXXG

SEQ ID NO: 797268 - protein, 52 aa, unidentified
  VARIANT 2: note = Any amino acid
  VARIANT 3: note = Any amino acid
  VARIANT 4: note = Any amino acid
  VARIANT 5: note = Any amino acid
  VARIANT 6: note = Any amino acid
  VARIANT 7: note = Any amino acid
  VARIANT 8: note = Any amino acid
  VARIANT 9: note = Any amino acid
  VARIANT 10: note = Any amino acid
  VARIANT 11: note = Any amino acid
  VARIANT 12: note = Any amino acid
  VARIANT 13: note = Any amino acid
  VARIANT 14: note = Any amino acid
  VARIANT 15: note = Any amino acid
  VARIANT 16: note = Any amino acid
  VARIANT 17: note = Any amino acid
  VARIANT 18: note = Any amino acid
  VARIANT 19: note = Any amino acid
  VARIANT 20: note = Any amino acid
  VARIANT 21: note = Any amino acid
  VARIANT 22: note = Any amino acid
  VARIANT 23: note = Any amino acid
  VARIANT 24: note = Any amino acid
  VARIANT 25: note = Any amino acid
  VARIANT 26: note = Any amino acid
  VARIANT 27: note = Any amino acid
  VARIANT 28: note = Any amino acid
  VARIANT 29: note = Any amino acid
  VARIANT 30: note = Any amino acid
  VARIANT 31: note = Any amino acid
  VARIANT 33: note = Any amino acid
  VARIANT 34: note = Any amino acid
  VARIANT 35: note = Any amino acid
  VARIANT 36: note = Any amino acid
  VARIANT 37: note = Any amino acid
  VARIANT 38: note = Any amino acid
  VARIANT 39: note = Any amino acid
  VARIANT 42: note = Any amino acid
  VARIANT 43: note = Any amino acid
  VARIANT 44: note = Any amino acid
  VARIANT 45: note = Any amino acid
  VARIANT 46: note = Any amino acid
  VARIANT 47: note = Any amino acid
  VARIANT 48: note = Any amino acid
  VARIANT 49: note = Any amino acid
  VARIANT 50: note = Any amino acid
  VARIANT 51: note = Any amino acid
GXXXXXXXXXXXXXXXXXXXXXXXXXXXXXXNXXXXXXXSAXXXXXXXXXXT

SEQ ID NO: 797269 - protein, 53 aa, unidentified
  VARIANT 2: note = Any amino acid
  VARIANT 3: note = Any amino acid
  VARIANT 4: note = Any amino acid
  VARIANT 5: note = Any amino acid
  VARIANT 6: note = Any amino acid
  VARIANT 7: note = Any amino acid
  VARIANT 8: note = Any amino acid
  VARIANT 9: note = Any amino acid
  VARIANT 10: note = Any amino acid
  VARIANT 11: note = Any amino acid
  VARIANT 12: note = Any amino acid
  VARIANT 13: note = Any amino acid
  VARIANT 14: note = Any amino acid
  VARIANT 15: note = Any amino acid
  VARIANT 16: note = Any amino acid
  VARIANT 17: note = Any amino acid
  VARIANT 18: note = Any amino acid
  VARIANT 19: note = Any amino acid
  VARIANT 20: note = Any amino acid
  VARIANT 21: note = Any amino acid
  VARIANT 22: note = Any amino acid
  VARIANT 23: note = Any amino acid
  VARIANT 24: note = Any amino acid
  VARIANT 25: note = Any amino acid
  VARIANT 26: note = Any amino acid
  VARIANT 27: note = Any amino acid
  VARIANT 28: note = Any amino acid
  VARIANT 29: note = Any amino acid
  VARIANT 30: note = Any amino acid
  VARIANT 31: note = Any amino acid
  VARIANT 33: note = Any amino acid
  VARIANT 34: note = Any amino acid
  VARIANT 35: note = Any amino acid
  VARIANT 36: note = Any amino acid
  VARIANT 37: note = Any amino acid
  VARIANT 38: note = Any amino acid
  VARIANT 39: note = Any amino acid
  VARIANT 42: note = Any amino acid
  VARIANT 43: note = Any amino acid
  VARIANT 44: note = Any amino acid
  VARIANT 45: note = Any amino acid
  VARIANT 46: note = Any amino acid
  VARIANT 47: note = Any amino acid
  VARIANT 48: note = Any amino acid
  VARIANT 49: note = Any amino acid
  VARIANT 50: note = Any amino acid
  VARIANT 51: note = Any amino acid
  VARIANT 52: note = Any amino acid
GXXXXXXXXXXXXXXXXXXXXXXXXXXXXXXSXXXXXXXSGXXXXXXXXXXXA

SEQ ID NO: 797270 - protein, 53 aa, unidentified
  VARIANT 2: note = Any amino acid
  VARIANT 3: note = Any amino acid
  VARIANT 4: note = Any amino acid
  VARIANT 5: note = Any amino acid
  VARIANT 6: note = Any amino acid
  VARIANT 7: note = Any amino acid
  VARIANT 8: note = Any amino acid
  VARIANT 9: note = Any amino acid
  VARIANT 10: note = Any amino acid
  VARIANT 11: note = Any amino acid
  VARIANT 12: note = Any amino acid
  VARIANT 13: note = Any amino acid
  VARIANT 14: note = Any amino acid
  VARIANT 15: note = Any amino acid
  VARIANT 16: note = Any amino acid
  VARIANT 17: note = Any amino acid
  VARIANT 18: note = Any amino acid
  VARIANT 19: note = Any amino acid
  VARIANT 20: note = Any amino acid
  VARIANT 21: note = Any amino acid
  VARIANT 22: note = Any amino acid
  VARIANT 23: note = Any amino acid
  VARIANT 24: note = Any amino acid
  VARIANT 25: note = Any amino acid
  VARIANT 26: note = Any amino acid
  VARIANT 27: note = Any amino acid
  VARIANT 28: note = Any amino acid
  VARIANT 29: note = Any amino acid
  VARIANT 30: note = Any amino acid
  VARIANT 32: note = Any amino acid
  VARIANT 33: note = Any amino acid
  VARIANT 34: note = Any amino acid
  VARIANT 35: note = Any amino acid
  VARIANT 36: note = Any amino acid
  VARIANT 37: note = Any amino acid
  VARIANT 38: note = Any amino acid
  VARIANT 41: note = Any amino acid
  VARIANT 42: note = Any amino acid
  VARIANT 43: note = Any amino acid
  VARIANT 44: note = Any amino acid
  VARIANT 45: note = Any amino acid
  VARIANT 46: note = Any amino acid
  VARIANT 47: note = Any amino acid
  VARIANT 48: note = Any amino acid
  VARIANT 49: note = Any amino acid
  VARIANT 50: note = Any amino acid
  VARIANT 51: note = Any amino acid
  VARIANT 52: note = Any amino acid
YXXXXXXXXXXXXXXXXXXXXXXXXXXXXXGXXXXXXXSAXXXXXXXXXXXXG

SEQ ID NO: 797271 - protein, 55 aa, unidentified
  VARIANT 2: note = Any amino acid
  VARIANT 3: note = Any amino acid
  VARIANT 4: note = Any amino acid
  VARIANT 5: note = Any amino acid
  VARIANT 6: note = Any amino acid
  VARIANT 7: note = Any amino acid
  VARIANT 8: note = Any amino acid
  VARIANT 9: note = Any amino acid
  VARIANT 10: note = Any amino acid
  VARIANT 11: note = Any amino acid
  VARIANT 12: note = Any amino acid
  VARIANT 13: note = Any amino acid
  VARIANT 14: note = Any amino acid
  VARIANT 15: note = Any amino acid
  VARIANT 16: note = Any amino acid
  VARIANT 17: note = Any amino acid
  VARIANT 18: note = Any amino acid
  VARIANT 19: note = Any amino acid
  VARIANT 20: note = Any amino acid
  VARIANT 21: note = Any amino acid
  VARIANT 22: note = Any amino acid
  VARIANT 23: note = Any amino acid
  VARIANT 24: note = Any amino acid
  VARIANT 25: note = Any amino acid
  VARIANT 26: note = Any amino acid
  VARIANT 27: note = Any amino acid
  VARIANT 28: note = Any amino acid
  VARIANT 29: note = Any amino acid
  VARIANT 30: note = Any amino acid
  VARIANT 32: note = Any amino acid
  VARIANT 33: note = Any amino acid
  VARIANT 34: note = Any amino acid
  VARIANT 35: note = Any amino acid
  VARIANT 36: note = Any amino acid
  VARIANT 37: note = Any amino acid
  VARIANT 38: note = Any amino acid
  VARIANT 41: note = Any amino acid
  VARIANT 42: note = Any amino acid
  VARIANT 43: note = Any amino acid
  VARIANT 44: note = Any amino acid
  VARIANT 45: note = Any amino acid
  VARIANT 46: note = Any amino acid
  VARIANT 47: note = Any amino acid
  VARIANT 48: note = Any amino acid
  VARIANT 49: note = Any amino acid
  VARIANT 50: note = Any amino acid
  VARIANT 51: note = Any amino acid
  VARIANT 52: note = Any amino acid
  VARIANT 53: note = Any amino acid
  VARIANT 54: note = Any amino acid
GXXXXXXXXXXXXXXXXXXXXXXXXXXXXXGXXXXXXXSAXXXXXXXXXXXXXXG

SEQ ID NO: 797272 - protein, 55 aa, unidentified
  VARIANT 2: note = Any amino acid
  VARIANT 3: note = Any amino acid
  VARIANT 4: note = Any amino acid
  VARIANT 5: note = Any amino acid
  VARIANT 6: note = Any amino acid
  VARIANT 7: note = Any amino acid
  VARIANT 8: note = Any amino acid
  VARIANT 9: note = Any amino acid
  VARIANT 10: note = Any amino acid
  VARIANT 11: note = Any amino acid
  VARIANT 12: note = Any amino acid
  VARIANT 13: note = Any amino acid
  VARIANT 14: note = Any amino acid
  VARIANT 15: note = Any amino acid
  VARIANT 16: note = Any amino acid
  VARIANT 17: note = Any amino acid
  VARIANT 18: note = Any amino acid
  VARIANT 19: note = Any amino acid
  VARIANT 20: note = Any amino acid
  VARIANT 21: note = Any amino acid
  VARIANT 22: note = Any amino acid
  VARIANT 23: note = Any amino acid
  VARIANT 24: note = Any amino acid
  VARIANT 25: note = Any amino acid
  VARIANT 26: note = Any amino acid
  VARIANT 27: note = Any amino acid
  VARIANT 28: note = Any amino acid
  VARIANT 29: note = Any amino acid
  VARIANT 30: note = Any amino acid
  VARIANT 32: note = Any amino acid
  VARIANT 33: note = Any amino acid
  VARIANT 34: note = Any amino acid
  VARIANT 35: note = Any amino acid
  VARIANT 36: note = Any amino acid
  VARIANT 37: note = Any amino acid
  VARIANT 38: note = Any amino acid
  VARIANT 41: note = Any amino acid
  VARIANT 42: note = Any amino acid
  VARIANT 43: note = Any amino acid
  VARIANT 44: note = Any amino acid
  VARIANT 45: note = Any amino acid
  VARIANT 46: note = Any amino acid
  VARIANT 47: note = Any amino acid
  VARIANT 48: note = Any amino acid
  VARIANT 49: note = Any amino acid
  VARIANT 50: note = Any amino acid
  VARIANT 51: note = Any amino acid
  VARIANT 52: note = Any amino acid
  VARIANT 53: note = Any amino acid
  VARIANT 54: note = Any amino acid
GXXXXXXXXXXXXXXXXXXXXXXXXXXXXXGXXXXXXXTGXXXXXXXXXXXXXXS

SEQ ID NO: 797273 - protein, 53 aa, unidentified
  VARIANT 2: note = Any amino acid
  VARIANT 3: note = Any amino acid
  VARIANT 4: note = Any amino acid
  VARIANT 5: note = Any amino acid
  VARIANT 6: note = Any amino acid
  VARIANT 7: note = Any amino acid
  VARIANT 8: note = Any amino acid
  VARIANT 9: note = Any amino acid
  VARIANT 10: note = Any amino acid
  VARIANT 11: note = Any amino acid
  VARIANT 12: note = Any amino acid
  VARIANT 13: note = Any amino acid
  VARIANT 14: note = Any amino acid
  VARIANT 15: note = Any amino acid
  VARIANT 16: note = Any amino acid
  VARIANT 17: note = Any amino acid
  VARIANT 18: note = Any amino acid
  VARIANT 19: note = Any amino acid
  VARIANT 20: note = Any amino acid
  VARIANT 21: note = Any amino acid
  VARIANT 22: note = Any amino acid
  VARIANT 23: note = Any amino acid
  VARIANT 24: note = Any amino acid
  VARIANT 25: note = Any amino acid
  VARIANT 26: note = Any amino acid
  VARIANT 27: note = Any amino acid
  VARIANT 28: note = Any amino acid
  VARIANT 29: note = Any amino acid
  VARIANT 30: note = Any amino acid
  VARIANT 31: note = Any amino acid
  VARIANT 33: note = Any amino acid
  VARIANT 34: note = Any amino acid
  VARIANT 35: note = Any amino acid
  VARIANT 36: note = Any amino acid
  VARIANT 37: note = Any amino acid
  VARIANT 38: note = Any amino acid
  VARIANT 39: note = Any amino acid
  VARIANT 42: note = Any amino acid
  VARIANT 43: note = Any amino acid
  VARIANT 44: note = Any amino acid
  VARIANT 45: note = Any amino acid
  VARIANT 46: note = Any amino acid
  VARIANT 47: note = Any amino acid
  VARIANT 48: note = Any amino acid
  VARIANT 49: note = Any amino acid
  VARIANT 50: note = Any amino acid
  VARIANT 51: note = Any amino acid
  VARIANT 52: note = Any amino acid
GXXXXXXXXXXXXXXXXXXXXXXXXXXXXXXGXXXXXXXTGXXXXXXXXXXXG

SEQ ID NO: 797274 - protein, 52 aa, unidentified
  VARIANT 2: note = Any amino acid
  VARIANT 3: note = Any amino acid
  VARIANT 4: note = Any amino acid
  VARIANT 5: note = Any amino acid
  VARIANT 6: note = Any amino acid
  VARIANT 7: note = Any amino acid
  VARIANT 8: note = Any amino acid
  VARIANT 9: note = Any amino acid
  VARIANT 10: note = Any amino acid
  VARIANT 11: note = Any amino acid
  VARIANT 12: note = Any amino acid
  VARIANT 13: note = Any amino acid
  VARIANT 14: note = Any amino acid
  VARIANT 15: note = Any amino acid
  VARIANT 16: note = Any amino acid
  VARIANT 17: note = Any amino acid
  VARIANT 18: note = Any amino acid
  VARIANT 19: note = Any amino acid
  VARIANT 20: note = Any amino acid
  VARIANT 21: note = Any amino acid
  VARIANT 22: note = Any amino acid
  VARIANT 23: note = Any amino acid
  VARIANT 24: note = Any amino acid
  VARIANT 25: note = Any amino acid
  VARIANT 26: note = Any amino acid
  VARIANT 27: note = Any amino acid
  VARIANT 28: note = Any amino acid
  VARIANT 29: note = Any amino acid
  VARIANT 30: note = Any amino acid
  VARIANT 31: note = Any amino acid
  VARIANT 33: note = Any amino acid
  VARIANT 34: note = Any amino acid
  VARIANT 35: note = Any amino acid
  VARIANT 36: note = Any amino acid
  VARIANT 37: note = Any amino acid
  VARIANT 38: note = Any amino acid
  VARIANT 39: note = Any amino acid
  VARIANT 42: note = Any amino acid
  VARIANT 43: note = Any amino acid
  VARIANT 44: note = Any amino acid
  VARIANT 45: note = Any amino acid
  VARIANT 46: note = Any amino acid
  VARIANT 47: note = Any amino acid
  VARIANT 48: note = Any amino acid
  VARIANT 49: note = Any amino acid
  VARIANT 50: note = Any amino acid
  VARIANT 51: note = Any amino acid
GXXXXXXXXXXXXXXXXXXXXXXXXXXXXXXTXXXXXXXSGXXXXXXXXXXT

SEQ ID NO: 797275 - protein, 52 aa, unidentified
  VARIANT 2: note = Any amino acid
  VARIANT 3: note = Any amino acid
  VARIANT 4: note = Any amino acid
  VARIANT 5: note = Any amino acid
  VARIANT 6: note = Any amino acid
  VARIANT 7: note = Any amino acid
  VARIANT 8: note = Any amino acid
  VARIANT 9: note = Any amino acid
  VARIANT 10: note = Any amino acid
  VARIANT 11: note = Any amino acid
  VARIANT 12: note = Any amino acid
  VARIANT 13: note = Any amino acid
  VARIANT 14: note = Any amino acid
  VARIANT 15: note = Any amino acid
  VARIANT 16: note = Any amino acid
  VARIANT 17: note = Any amino acid
  VARIANT 18: note = Any amino acid
  VARIANT 19: note = Any amino acid
  VARIANT 20: note = Any amino acid
  VARIANT 21: note = Any amino acid
  VARIANT 22: note = Any amino acid
  VARIANT 23: note = Any amino acid
  VARIANT 24: note = Any amino acid
  VARIANT 25: note = Any amino acid
  VARIANT 26: note = Any amino acid
  VARIANT 27: note = Any amino acid
  VARIANT 28: note = Any amino acid
  VARIANT 29: note = Any amino acid
  VARIANT 30: note = Any amino acid
  VARIANT 32: note = Any amino acid
  VARIANT 33: note = Any amino acid
  VARIANT 34: note = Any amino acid
  VARIANT 35: note = Any amino acid
  VARIANT 36: note = Any amino acid
  VARIANT 37: note = Any amino acid
  VARIANT 38: note = Any amino acid
  VARIANT 41: note = Any amino acid
  VARIANT 42: note = Any amino acid
  VARIANT 43: note = Any amino acid
  VARIANT 44: note = Any amino acid
  VARIANT 45: note = Any amino acid
  VARIANT 46: note = Any amino acid
  VARIANT 47: note = Any amino acid
  VARIANT 48: note = Any amino acid
  VARIANT 49: note = Any amino acid
  VARIANT 50: note = Any amino acid
  VARIANT 51: note = Any amino acid
GXXXXXXXXXXXXXXXXXXXXXXXXXXXXXGXXXXXXXSDXXXXXXXXXXXR

SEQ ID NO: 797276 - protein, 51 aa, unidentified
  VARIANT 2: note = Any amino acid
  VARIANT 3: note = Any amino acid
  VARIANT 4: note = Any amino acid
  VARIANT 5: note = Any amino acid
  VARIANT 6: note = Any amino acid
  VARIANT 7: note = Any amino acid
  VARIANT 8: note = Any amino acid
  VARIANT 9: note = Any amino acid
  VARIANT 10: note = Any amino acid
  VARIANT 11: note = Any amino acid
  VARIANT 12: note = Any amino acid
  VARIANT 13: note = Any amino acid
  VARIANT 14: note = Any amino acid
  VARIANT 15: note = Any amino acid
  VARIANT 16: note = Any amino acid
  VARIANT 17: note = Any amino acid
  VARIANT 18: note = Any amino acid
  VARIANT 19: note = Any amino acid
  VARIANT 20: note = Any amino acid
  VARIANT 21: note = Any amino acid
  VARIANT 22: note = Any amino acid
  VARIANT 23: note = Any amino acid
  VARIANT 24: note = Any amino acid
  VARIANT 25: note = Any amino acid
  VARIANT 26: note = Any amino acid
  VARIANT 27: note = Any amino acid
  VARIANT 28: note = Any amino acid
  VARIANT 29: note = Any amino acid
  VARIANT 30: note = Any amino acid
  VARIANT 32: note = Any amino acid
  VARIANT 33: note = Any amino acid
  VARIANT 34: note = Any amino acid
  VARIANT 35: note = Any amino acid
  VARIANT 36: note = Any amino acid
  VARIANT 37: note = Any amino acid
  VARIANT 38: note = Any amino acid
  VARIANT 41: note = Any amino acid
  VARIANT 42: note = Any amino acid
  VARIANT 43: note = Any amino acid
  VARIANT 44: note = Any amino acid
  VARIANT 45: note = Any amino acid
  VARIANT 46: note = Any amino acid
  VARIANT 47: note = Any amino acid
  VARIANT 48: note = Any amino acid
  VARIANT 49: note = Any amino acid
  VARIANT 50: note = Any amino acid
GXXXXXXXXXXXXXXXXXXXXXXXXXXXXXGXXXXXXXTGXXXXXXXXXXC

SEQ ID NO: 797277 - protein, 52 aa, unidentified
  VARIANT 2: note = Any amino acid
  VARIANT 3: note = Any amino acid
  VARIANT 4: note = Any amino acid
  VARIANT 5: note = Any amino acid
  VARIANT 6: note = Any amino acid
  VARIANT 7: note = Any amino acid
  VARIANT 8: note = Any amino acid
  VARIANT 9: note = Any amino acid
  VARIANT 10: note = Any amino acid
  VARIANT 11: note = Any amino acid
  VARIANT 12: note = Any amino acid
  VARIANT 13: note = Any amino acid
  VARIANT 14: note = Any amino acid
  VARIANT 15: note = Any amino acid
  VARIANT 16: note = Any amino acid
  VARIANT 17: note = Any amino acid
  VARIANT 18: note = Any amino acid
  VARIANT 19: note = Any amino acid
  VARIANT 20: note = Any amino acid
  VARIANT 21: note = Any amino acid
  VARIANT 22: note = Any amino acid
  VARIANT 23: note = Any amino acid
  VARIANT 24: note = Any amino acid
  VARIANT 25: note = Any amino acid
  VARIANT 26: note = Any amino acid
  VARIANT 27: note = Any amino acid
  VARIANT 28: note = Any amino acid
  VARIANT 29: note = Any amino acid
  VARIANT 30: note = Any amino acid
  VARIANT 31: note = Any amino acid
  VARIANT 33: note = Any amino acid
  VARIANT 34: note = Any amino acid
  VARIANT 35: note = Any amino acid
  VARIANT 36: note = Any amino acid
  VARIANT 37: note = Any amino acid
  VARIANT 38: note = Any amino acid
  VARIANT 39: note = Any amino acid
  VARIANT 42: note = Any amino acid
  VARIANT 43: note = Any amino acid
  VARIANT 44: note = Any amino acid
  VARIANT 45: note = Any amino acid
  VARIANT 46: note = Any amino acid
  VARIANT 47: note = Any amino acid
  VARIANT 48: note = Any amino acid
  VARIANT 49: note = Any amino acid
  VARIANT 50: note = Any amino acid
  VARIANT 51: note = Any amino acid
GXXXXXXXXXXXXXXXXXXXXXXXXXXXXXXGXXXXXXXSGXXXXXXXXXXY

SEQ ID NO: 797278 - protein, 53 aa, unidentified
  VARIANT 2: note = Any amino acid
  VARIANT 3: note = Any amino acid
  VARIANT 4: note = Any amino acid
  VARIANT 5: note = Any amino acid
  VARIANT 6: note = Any amino acid
  VARIANT 7: note = Any amino acid
  VARIANT 8: note = Any amino acid
  VARIANT 9: note = Any amino acid
  VARIANT 10: note = Any amino acid
  VARIANT 11: note = Any amino acid
  VARIANT 12: note = Any amino acid
  VARIANT 13: note = Any amino acid
  VARIANT 14: note = Any amino acid
  VARIANT 15: note = Any amino acid
  VARIANT 16: note = Any amino acid
  VARIANT 17: note = Any amino acid
  VARIANT 18: note = Any amino acid
  VARIANT 19: note = Any amino acid
  VARIANT 20: note = Any amino acid
  VARIANT 21: note = Any amino acid
  VARIANT 22: note = Any amino acid
  VARIANT 23: note = Any amino acid
  VARIANT 24: note = Any amino acid
  VARIANT 25: note = Any amino acid
  VARIANT 26: note = Any amino acid
  VARIANT 27: note = Any amino acid
  VARIANT 28: note = Any amino acid
  VARIANT 29: note = Any amino acid
  VARIANT 30: note = Any amino acid
  VARIANT 31: note = Any amino acid
  VARIANT 33: note = Any amino acid
  VARIANT 34: note = Any amino acid
  VARIANT 35: note = Any amino acid
  VARIANT 36: note = Any amino acid
  VARIANT 37: note = Any amino acid
  VARIANT 38: note = Any amino acid
  VARIANT 39: note = Any amino acid
  VARIANT 42: note = Any amino acid
  VARIANT 43: note = Any amino acid
  VARIANT 44: note = Any amino acid
  VARIANT 45: note = Any amino acid
  VARIANT 46: note = Any amino acid
  VARIANT 47: note = Any amino acid
  VARIANT 48: note = Any amino acid
  VARIANT 49: note = Any amino acid
  VARIANT 50: note = Any amino acid
  VARIANT 51: note = Any amino acid
  VARIANT 52: note = Any amino acid
GXXXXXXXXXXXXXXXXXXXXXXXXXXXXXXGXXXXXXXSGXXXXXXXXXXXT

SEQ ID NO: 797279 - protein, 53 aa, unidentified
  VARIANT 2: note = Any amino acid
  VARIANT 3: note = Any amino acid
  VARIANT 4: note = Any amino acid
  VARIANT 5: note = Any amino acid
  VARIANT 6: note = Any amino acid
  VARIANT 7: note = Any amino acid
  VARIANT 8: note = Any amino acid
  VARIANT 9: note = Any amino acid
  VARIANT 10: note = Any amino acid
  VARIANT 11: note = Any amino acid
  VARIANT 12: note = Any amino acid
  VARIANT 13: note = Any amino acid
  VARIANT 14: note = Any amino acid
  VARIANT 15: note = Any amino acid
  VARIANT 16: note = Any amino acid
  VARIANT 17: note = Any amino acid
  VARIANT 18: note = Any amino acid
  VARIANT 19: note = Any amino acid
  VARIANT 20: note = Any amino acid
  VARIANT 21: note = Any amino acid
  VARIANT 22: note = Any amino acid
  VARIANT 23: note = Any amino acid
  VARIANT 24: note = Any amino acid
  VARIANT 25: note = Any amino acid
  VARIANT 26: note = Any amino acid
  VARIANT 27: note = Any amino acid
  VARIANT 28: note = Any amino acid
  VARIANT 29: note = Any amino acid
  VARIANT 30: note = Any amino acid
  VARIANT 31: note = Any amino acid
  VARIANT 33: note = Any amino acid
  VARIANT 34: note = Any amino acid
  VARIANT 35: note = Any amino acid
  VARIANT 36: note = Any amino acid
  VARIANT 37: note = Any amino acid
  VARIANT 38: note = Any amino acid
  VARIANT 39: note = Any amino acid
  VARIANT 42: note = Any amino acid
  VARIANT 43: note = Any amino acid
  VARIANT 44: note = Any amino acid
  VARIANT 45: note = Any amino acid
  VARIANT 46: note = Any amino acid
  VARIANT 47: note = Any amino acid
  VARIANT 48: note = Any amino acid
  VARIANT 49: note = Any amino acid
  VARIANT 50: note = Any amino acid
  VARIANT 51: note = Any amino acid
  VARIANT 52: note = Any amino acid
GXXXXXXXXXXXXXXXXXXXXXXXXXXXXXXGXXXXXXXTGXXXXXXXXXXXK

SEQ ID NO: 797280 - protein, 52 aa, unidentified
  VARIANT 2: note = Any amino acid
  VARIANT 3: note = Any amino acid
  VARIANT 4: note = Any amino acid
  VARIANT 5: note = Any amino acid
  VARIANT 6: note = Any amino acid
  VARIANT 7: note = Any amino acid
  VARIANT 8: note = Any amino acid
  VARIANT 9: note = Any amino acid
  VARIANT 10: note = Any amino acid
  VARIANT 11: note = Any amino acid
  VARIANT 12: note = Any amino acid
  VARIANT 13: note = Any amino acid
  VARIANT 14: note = Any amino acid
  VARIANT 15: note = Any amino acid
  VARIANT 16: note = Any amino acid
  VARIANT 17: note = Any amino acid
  VARIANT 18: note = Any amino acid
  VARIANT 19: note = Any amino acid
  VARIANT 20: note = Any amino acid
  VARIANT 21: note = Any amino acid
  VARIANT 22: note = Any amino acid
  VARIANT 23: note = Any amino acid
  VARIANT 24: note = Any amino acid
  VARIANT 25: note = Any amino acid
  VARIANT 26: note = Any amino acid
  VARIANT 27: note = Any amino acid
  VARIANT 28: note = Any amino acid
  VARIANT 29: note = Any amino acid
  VARIANT 30: note = Any amino acid
  VARIANT 31: note = Any amino acid
  VARIANT 33: note = Any amino acid
  VARIANT 34: note = Any amino acid
  VARIANT 35: note = Any amino acid
  VARIANT 36: note = Any amino acid
  VARIANT 37: note = Any amino acid
  VARIANT 38: note = Any amino acid
  VARIANT 39: note = Any amino acid
  VARIANT 42: note = Any amino acid
  VARIANT 43: note = Any amino acid
  VARIANT 44: note = Any amino acid
  VARIANT 45: note = Any amino acid
  VARIANT 46: note = Any amino acid
  VARIANT 47: note = Any amino acid
  VARIANT 48: note = Any amino acid
  VARIANT 49: note = Any amino acid
  VARIANT 50: note = Any amino acid
  VARIANT 51: note = Any amino acid
GXXXXXXXXXXXXXXXXXXXXXXXXXXXXXXQXXXXXXXSGXXXXXXXXXXG

SEQ ID NO: 797281 - protein, 53 aa, unidentified
  VARIANT 2: note = Any amino acid
  VARIANT 3: note = Any amino acid
  VARIANT 4: note = Any amino acid
  VARIANT 5: note = Any amino acid
  VARIANT 6: note = Any amino acid
  VARIANT 7: note = Any amino acid
  VARIANT 8: note = Any amino acid
  VARIANT 9: note = Any amino acid
  VARIANT 10: note = Any amino acid
  VARIANT 11: note = Any amino acid
  VARIANT 12: note = Any amino acid
  VARIANT 13: note = Any amino acid
  VARIANT 14: note = Any amino acid
  VARIANT 15: note = Any amino acid
  VARIANT 16: note = Any amino acid
  VARIANT 17: note = Any amino acid
  VARIANT 18: note = Any amino acid
  VARIANT 19: note = Any amino acid
  VARIANT 20: note = Any amino acid
  VARIANT 21: note = Any amino acid
  VARIANT 22: note = Any amino acid
  VARIANT 23: note = Any amino acid
  VARIANT 24: note = Any amino acid
  VARIANT 25: note = Any amino acid
  VARIANT 26: note = Any amino acid
  VARIANT 27: note = Any amino acid
  VARIANT 28: note = Any amino acid
  VARIANT 29: note = Any amino acid
  VARIANT 30: note = Any amino acid
  VARIANT 31: note = Any amino acid
  VARIANT 33: note = Any amino acid
  VARIANT 34: note = Any amino acid
  VARIANT 35: note = Any amino acid
  VARIANT 36: note = Any amino acid
  VARIANT 37: note = Any amino acid
  VARIANT 38: note = Any amino acid
  VARIANT 39: note = Any amino acid
  VARIANT 42: note = Any amino acid
  VARIANT 43: note = Any amino acid
  VARIANT 44: note = Any amino acid
  VARIANT 45: note = Any amino acid
  VARIANT 46: note = Any amino acid
  VARIANT 47: note = Any amino acid
  VARIANT 48: note = Any amino acid
  VARIANT 49: note = Any amino acid
  VARIANT 50: note = Any amino acid
  VARIANT 51: note = Any amino acid
  VARIANT 52: note = Any amino acid
GXXXXXXXXXXXXXXXXXXXXXXXXXXXXXXRXXXXXXXSGXXXXXXXXXXXK

SEQ ID NO: 797282 - protein, 53 aa, unidentified
  VARIANT 2: note = Any amino acid
  VARIANT 3: note = Any amino acid
  VARIANT 4: note = Any amino acid
  VARIANT 5: note = Any amino acid
  VARIANT 6: note = Any amino acid
  VARIANT 7: note = Any amino acid
  VARIANT 8: note = Any amino acid
  VARIANT 9: note = Any amino acid
  VARIANT 10: note = Any amino acid
  VARIANT 11: note = Any amino acid
  VARIANT 12: note = Any amino acid
  VARIANT 13: note = Any amino acid
  VARIANT 14: note = Any amino acid
  VARIANT 15: note = Any amino acid
  VARIANT 16: note = Any amino acid
  VARIANT 17: note = Any amino acid
  VARIANT 18: note = Any amino acid
  VARIANT 19: note = Any amino acid
  VARIANT 20: note = Any amino acid
  VARIANT 21: note = Any amino acid
  VARIANT 22: note = Any amino acid
  VARIANT 23: note = Any amino acid
  VARIANT 24: note = Any amino acid
  VARIANT 25: note = Any amino acid
  VARIANT 26: note = Any amino acid
  VARIANT 27: note = Any amino acid
  VARIANT 28: note = Any amino acid
  VARIANT 29: note = Any amino acid
  VARIANT 30: note = Any amino acid
  VARIANT 31: note = Any amino acid
  VARIANT 32: note = Any amino acid
  VARIANT 34: note = Any amino acid
  VARIANT 35: note = Any amino acid
  VARIANT 36: note = Any amino acid
  VARIANT 37: note = Any amino acid
  VARIANT 38: note = Any amino acid
  VARIANT 39: note = Any amino acid
  VARIANT 40: note = Any amino acid
  VARIANT 43: note = Any amino acid
  VARIANT 44: note = Any amino acid
  VARIANT 45: note = Any amino acid
  VARIANT 46: note = Any amino acid
  VARIANT 47: note = Any amino acid
  VARIANT 48: note = Any amino acid
  VARIANT 49: note = Any amino acid
  VARIANT 50: note = Any amino acid
  VARIANT 51: note = Any amino acid
  VARIANT 52: note = Any amino acid
GXXXXXXXXXXXXXXXXXXXXXXXXXXXXXXXGXXXXXXXSGXXXXXXXXXXV

SEQ ID NO: 797283 - protein, 58 aa, unidentified
  VARIANT 2: note = Any amino acid
  VARIANT 3: note = Any amino acid
  VARIANT 4: note = Any amino acid
  VARIANT 5: note = Any amino acid
  VARIANT 6: note = Any amino acid
  VARIANT 7: note = Any amino acid
  VARIANT 8: note = Any amino acid
  VARIANT 9: note = Any amino acid
  VARIANT 10: note = Any amino acid
  VARIANT 11: note = Any amino acid
  VARIANT 12: note = Any amino acid
  VARIANT 13: note = Any amino acid
  VARIANT 14: note = Any amino acid
  VARIANT 15: note = Any amino acid
  VARIANT 16: note = Any amino acid
  VARIANT 17: note = Any amino acid
  VARIANT 18: note = Any amino acid
  VARIANT 19: note = Any amino acid
  VARIANT 20: note = Any amino acid
  VARIANT 21: note = Any amino acid
  VARIANT 22: note = Any amino acid
  VARIANT 23: note = Any amino acid
  VARIANT 24: note = Any amino acid
  VARIANT 25: note = Any amino acid
  VARIANT 26: note = Any amino acid
  VARIANT 27: note = Any amino acid
  VARIANT 28: note = Any amino acid
  VARIANT 29: note = Any amino acid
  VARIANT 30: note = Any amino acid
  VARIANT 31: note = Any amino acid
  VARIANT 32: note = Any amino acid
  VARIANT 33: note = Any amino acid
  VARIANT 34: note = Any amino acid
  VARIANT 35: note = Any amino acid
  VARIANT 36: note = Any amino acid
  VARIANT 38: note = Any amino acid
  VARIANT 39: note = Any amino acid
  VARIANT 40: note = Any amino acid
  VARIANT 41: note = Any amino acid
  VARIANT 42: note = Any amino acid
  VARIANT 43: note = Any amino acid
  VARIANT 44: note = Any amino acid
  VARIANT 47: note = Any amino acid
  VARIANT 48: note = Any amino acid
  VARIANT 49: note = Any amino acid
  VARIANT 50: note = Any amino acid
  VARIANT 51: note = Any amino acid
  VARIANT 52: note = Any amino acid
  VARIANT 53: note = Any amino acid
  VARIANT 54: note = Any amino acid
  VARIANT 55: note = Any amino acid
  VARIANT 56: note = Any amino acid
  VARIANT 57: note = Any amino acid
GXXXXXXXXXXXXXXXXXXXXXXXXXXXXXXXXXXXGXXXXXXXSGXXXXXXXXXXXG

SEQ ID NO: 797284 - protein, 52 aa, unidentified
  VARIANT 2: note = Any amino acid
  VARIANT 3: note = Any amino acid
  VARIANT 4: note = Any amino acid
  VARIANT 5: note = Any amino acid
  VARIANT 6: note = Any amino acid
  VARIANT 7: note = Any amino acid
  VARIANT 8: note = Any amino acid
  VARIANT 9: note = Any amino acid
  VARIANT 10: note = Any amino acid
  VARIANT 11: note = Any amino acid
  VARIANT 12: note = Any amino acid
  VARIANT 13: note = Any amino acid
  VARIANT 14: note = Any amino acid
  VARIANT 15: note = Any amino acid
  VARIANT 16: note = Any amino acid
  VARIANT 17: note = Any amino acid
  VARIANT 18: note = Any amino acid
  VARIANT 19: note = Any amino acid
  VARIANT 20: note = Any amino acid
  VARIANT 21: note = Any amino acid
  VARIANT 22: note = Any amino acid
  VARIANT 23: note = Any amino acid
  VARIANT 24: note = Any amino acid
  VARIANT 25: note = Any amino acid
  VARIANT 26: note = Any amino acid
  VARIANT 27: note = Any amino acid
  VARIANT 28: note = Any amino acid
  VARIANT 29: note = Any amino acid
  VARIANT 30: note = Any amino acid
  VARIANT 32: note = Any amino acid
  VARIANT 33: note = Any amino acid
  VARIANT 34: note = Any amino acid
  VARIANT 35: note = Any amino acid
  VARIANT 36: note = Any amino acid
  VARIANT 37: note = Any amino acid
  VARIANT 38: note = Any amino acid
  VARIANT 41: note = Any amino acid
  VARIANT 42: note = Any amino acid
  VARIANT 43: note = Any amino acid
  VARIANT 44: note = Any amino acid
  VARIANT 45: note = Any amino acid
  VARIANT 46: note = Any amino acid
  VARIANT 47: note = Any amino acid
  VARIANT 48: note = Any amino acid
  VARIANT 49: note = Any amino acid
  VARIANT 50: note = Any amino acid
  VARIANT 51: note = Any amino acid
HXXXXXXXXXXXXXXXXXXXXXXXXXXXXXGXXXXXXXSGXXXXXXXXXXXG

SEQ ID NO: 797285 - protein, 51 aa, unidentified
  VARIANT 2: note = Any amino acid
  VARIANT 3: note = Any amino acid
  VARIANT 4: note = Any amino acid
  VARIANT 5: note = Any amino acid
  VARIANT 6: note = Any amino acid
  VARIANT 7: note = Any amino acid
  VARIANT 8: note = Any amino acid
  VARIANT 9: note = Any amino acid
  VARIANT 10: note = Any amino acid
  VARIANT 11: note = Any amino acid
  VARIANT 12: note = Any amino acid
  VARIANT 13: note = Any amino acid
  VARIANT 14: note = Any amino acid
  VARIANT 15: note = Any amino acid
  VARIANT 16: note = Any amino acid
  VARIANT 17: note = Any amino acid
  VARIANT 18: note = Any amino acid
  VARIANT 19: note = Any amino acid
  VARIANT 20: note = Any amino acid
  VARIANT 21: note = Any amino acid
  VARIANT 22: note = Any amino acid
  VARIANT 23: note = Any amino acid
  VARIANT 24: note = Any amino acid
  VARIANT 25: note = Any amino acid
  VARIANT 26: note = Any amino acid
  VARIANT 27: note = Any amino acid
  VARIANT 28: note = Any amino acid
  VARIANT 29: note = Any amino acid
  VARIANT 30: note = Any amino acid
  VARIANT 32: note = Any amino acid
  VARIANT 33: note = Any amino acid
  VARIANT 34: note = Any amino acid
  VARIANT 35: note = Any amino acid
  VARIANT 36: note = Any amino acid
  VARIANT 37: note = Any amino acid
  VARIANT 38: note = Any amino acid
  VARIANT 41: note = Any amino acid
  VARIANT 42: note = Any amino acid
  VARIANT 43: note = Any amino acid
  VARIANT 44: note = Any amino acid
  VARIANT 45: note = Any amino acid
  VARIANT 46: note = Any amino acid
  VARIANT 47: note = Any amino acid
  VARIANT 48: note = Any amino acid
  VARIANT 49: note = Any amino acid
  VARIANT 50: note = Any amino acid
SXXXXXXXXXXXXXXXXXXXXXXXXXXXXXGXXXXXXXSGXXXXXXXXXXG

SEQ ID NO: 797286 - protein, 50 aa, unidentified
  VARIANT 2: note = Any amino acid
  VARIANT 3: note = Any amino acid
  VARIANT 4: note = Any amino acid
  VARIANT 5: note = Any amino acid
  VARIANT 6: note = Any amino acid
  VARIANT 7: note = Any amino acid
  VARIANT 8: note = Any amino acid
  VARIANT 9: note = Any amino acid
  VARIANT 10: note = Any amino acid
  VARIANT 11: note = Any amino acid
  VARIANT 12: note = Any amino acid
  VARIANT 13: note = Any amino acid
  VARIANT 14: note = Any amino acid
  VARIANT 15: note = Any amino acid
  VARIANT 16: note = Any amino acid
  VARIANT 17: note = Any amino acid
  VARIANT 18: note = Any amino acid
  VARIANT 19: note = Any amino acid
  VARIANT 20: note = Any amino acid
  VARIANT 21: note = Any amino acid
  VARIANT 22: note = Any amino acid
  VARIANT 23: note = Any amino acid
  VARIANT 24: note = Any amino acid
  VARIANT 25: note = Any amino acid
  VARIANT 26: note = Any amino acid
  VARIANT 27: note = Any amino acid
  VARIANT 28: note = Any amino acid
  VARIANT 29: note = Any amino acid
  VARIANT 31: note = Any amino acid
  VARIANT 32: note = Any amino acid
  VARIANT 33: note = Any amino acid
  VARIANT 34: note = Any amino acid
  VARIANT 35: note = Any amino acid
  VARIANT 36: note = Any amino acid
  VARIANT 37: note = Any amino acid
  VARIANT 40: note = Any amino acid
  VARIANT 41: note = Any amino acid
  VARIANT 42: note = Any amino acid
  VARIANT 43: note = Any amino acid
  VARIANT 44: note = Any amino acid
  VARIANT 45: note = Any amino acid
  VARIANT 46: note = Any amino acid
  VARIANT 47: note = Any amino acid
  VARIANT 48: note = Any amino acid
  VARIANT 49: note = Any amino acid
GXXXXXXXXXXXXXXXXXXXXXXXXXXXXGXXXXXXXSCXXXXXXXXXXG

SEQ ID NO: 797287 - protein, 52 aa, unidentified
  VARIANT 2: note = Any amino acid
  VARIANT 3: note = Any amino acid
  VARIANT 4: note = Any amino acid
  VARIANT 5: note = Any amino acid
  VARIANT 6: note = Any amino acid
  VARIANT 7: note = Any amino acid
  VARIANT 8: note = Any amino acid
  VARIANT 9: note = Any amino acid
  VARIANT 10: note = Any amino acid
  VARIANT 11: note = Any amino acid
  VARIANT 12: note = Any amino acid
  VARIANT 13: note = Any amino acid
  VARIANT 14: note = Any amino acid
  VARIANT 15: note = Any amino acid
  VARIANT 16: note = Any amino acid
  VARIANT 17: note = Any amino acid
  VARIANT 18: note = Any amino acid
  VARIANT 19: note = Any amino acid
  VARIANT 20: note = Any amino acid
  VARIANT 21: note = Any amino acid
  VARIANT 22: note = Any amino acid
  VARIANT 23: note = Any amino acid
  VARIANT 24: note = Any amino acid
  VARIANT 25: note = Any amino acid
  VARIANT 26: note = Any amino acid
  VARIANT 27: note = Any amino acid
  VARIANT 28: note = Any amino acid
  VARIANT 29: note = Any amino acid
  VARIANT 30: note = Any amino acid
  VARIANT 31: note = Any amino acid
  VARIANT 33: note = Any amino acid
  VARIANT 34: note = Any amino acid
  VARIANT 35: note = Any amino acid
  VARIANT 36: note = Any amino acid
  VARIANT 37: note = Any amino acid
  VARIANT 38: note = Any amino acid
  VARIANT 39: note = Any amino acid
  VARIANT 42: note = Any amino acid
  VARIANT 43: note = Any amino acid
  VARIANT 44: note = Any amino acid
  VARIANT 45: note = Any amino acid
  VARIANT 46: note = Any amino acid
  VARIANT 47: note = Any amino acid
  VARIANT 48: note = Any amino acid
  VARIANT 49: note = Any amino acid
  VARIANT 50: note = Any amino acid
  VARIANT 51: note = Any amino acid
GXXXXXXXXXXXXXXXXXXXXXXXXXXXXXXHXXXXXXXSAXXXXXXXXXXG

SEQ ID NO: 797288 - protein, 53 aa, unidentified
  VARIANT 2: note = Any amino acid
  VARIANT 3: note = Any amino acid
  VARIANT 4: note = Any amino acid
  VARIANT 5: note = Any amino acid
  VARIANT 6: note = Any amino acid
  VARIANT 7: note = Any amino acid
  VARIANT 8: note = Any amino acid
  VARIANT 9: note = Any amino acid
  VARIANT 10: note = Any amino acid
  VARIANT 11: note = Any amino acid
  VARIANT 12: note = Any amino acid
  VARIANT 13: note = Any amino acid
  VARIANT 14: note = Any amino acid
  VARIANT 15: note = Any amino acid
  VARIANT 16: note = Any amino acid
  VARIANT 17: note = Any amino acid
  VARIANT 18: note = Any amino acid
  VARIANT 19: note = Any amino acid
  VARIANT 20: note = Any amino acid
  VARIANT 21: note = Any amino acid
  VARIANT 22: note = Any amino acid
  VARIANT 23: note = Any amino acid
  VARIANT 24: note = Any amino acid
  VARIANT 25: note = Any amino acid
  VARIANT 26: note = Any amino acid
  VARIANT 27: note = Any amino acid
  VARIANT 28: note = Any amino acid
  VARIANT 29: note = Any amino acid
  VARIANT 30: note = Any amino acid
  VARIANT 31: note = Any amino acid
  VARIANT 32: note = Any amino acid
  VARIANT 34: note = Any amino acid
  VARIANT 35: note = Any amino acid
  VARIANT 36: note = Any amino acid
  VARIANT 37: note = Any amino acid
  VARIANT 38: note = Any amino acid
  VARIANT 39: note = Any amino acid
  VARIANT 40: note = Any amino acid
  VARIANT 43: note = Any amino acid
  VARIANT 44: note = Any amino acid
  VARIANT 45: note = Any amino acid
  VARIANT 46: note = Any amino acid
  VARIANT 47: note = Any amino acid
  VARIANT 48: note = Any amino acid
  VARIANT 49: note = Any amino acid
  VARIANT 50: note = Any amino acid
  VARIANT 51: note = Any amino acid
  VARIANT 52: note = Any amino acid
GXXXXXXXXXXXXXXXXXXXXXXXXXXXXXXXSXXXXXXXSAXXXXXXXXXXA

SEQ ID NO: 797289 - protein, 56 aa, unidentified
  VARIANT 2: note = Any amino acid
  VARIANT 3: note = Any amino acid
  VARIANT 4: note = Any amino acid
  VARIANT 5: note = Any amino acid
  VARIANT 6: note = Any amino acid
  VARIANT 7: note = Any amino acid
  VARIANT 8: note = Any amino acid
  VARIANT 9: note = Any amino acid
  VARIANT 10: note = Any amino acid
  VARIANT 11: note = Any amino acid
  VARIANT 12: note = Any amino acid
  VARIANT 13: note = Any amino acid
  VARIANT 14: note = Any amino acid
  VARIANT 15: note = Any amino acid
  VARIANT 16: note = Any amino acid
  VARIANT 17: note = Any amino acid
  VARIANT 18: note = Any amino acid
  VARIANT 19: note = Any amino acid
  VARIANT 20: note = Any amino acid
  VARIANT 21: note = Any amino acid
  VARIANT 22: note = Any amino acid
  VARIANT 23: note = Any amino acid
  VARIANT 24: note = Any amino acid
  VARIANT 25: note = Any amino acid
  VARIANT 26: note = Any amino acid
  VARIANT 27: note = Any amino acid
  VARIANT 28: note = Any amino acid
  VARIANT 29: note = Any amino acid
  VARIANT 30: note = Any amino acid
  VARIANT 31: note = Any amino acid
  VARIANT 32: note = Any amino acid
  VARIANT 33: note = Any amino acid
  VARIANT 35: note = Any amino acid
  VARIANT 36: note = Any amino acid
  VARIANT 37: note = Any amino acid
  VARIANT 38: note = Any amino acid
  VARIANT 39: note = Any amino acid
  VARIANT 40: note = Any amino acid
  VARIANT 41: note = Any amino acid
  VARIANT 44: note = Any amino acid
  VARIANT 45: note = Any amino acid
  VARIANT 46: note = Any amino acid
  VARIANT 47: note = Any amino acid
  VARIANT 48: note = Any amino acid
  VARIANT 49: note = Any amino acid
  VARIANT 50: note = Any amino acid
  VARIANT 51: note = Any amino acid
  VARIANT 52: note = Any amino acid
  VARIANT 53: note = Any amino acid
  VARIANT 54: note = Any amino acid
  VARIANT 55: note = Any amino acid
GXXXXXXXXXXXXXXXXXXXXXXXXXXXXXXXXGXXXXXXXSGXXXXXXXXXXXXG

SEQ ID NO: 797290 - protein, 54 aa, unidentified
  VARIANT 2: note = Any amino acid
  VARIANT 3: note = Any amino acid
  VARIANT 4: note = Any amino acid
  VARIANT 5: note = Any amino acid
  VARIANT 6: note = Any amino acid
  VARIANT 7: note = Any amino acid
  VARIANT 8: note = Any amino acid
  VARIANT 9: note = Any amino acid
  VARIANT 10: note = Any amino acid
  VARIANT 11: note = Any amino acid
  VARIANT 12: note = Any amino acid
  VARIANT 13: note = Any amino acid
  VARIANT 14: note = Any amino acid
  VARIANT 15: note = Any amino acid
  VARIANT 16: note = Any amino acid
  VARIANT 17: note = Any amino acid
  VARIANT 18: note = Any amino acid
  VARIANT 19: note = Any amino acid
  VARIANT 20: note = Any amino acid
  VARIANT 21: note = Any amino acid
  VARIANT 22: note = Any amino acid
  VARIANT 23: note = Any amino acid
  VARIANT 24: note = Any amino acid
  VARIANT 25: note = Any amino acid
  VARIANT 26: note = Any amino acid
  VARIANT 27: note = Any amino acid
  VARIANT 28: note = Any amino acid
  VARIANT 29: note = Any amino acid
  VARIANT 30: note = Any amino acid
  VARIANT 31: note = Any amino acid
  VARIANT 32: note = Any amino acid
  VARIANT 33: note = Any amino acid
  VARIANT 35: note = Any amino acid
  VARIANT 36: note = Any amino acid
  VARIANT 37: note = Any amino acid
  VARIANT 38: note = Any amino acid
  VARIANT 39: note = Any amino acid
  VARIANT 40: note = Any amino acid
  VARIANT 41: note = Any amino acid
  VARIANT 44: note = Any amino acid
  VARIANT 45: note = Any amino acid
  VARIANT 46: note = Any amino acid
  VARIANT 47: note = Any amino acid
  VARIANT 48: note = Any amino acid
  VARIANT 49: note = Any amino acid
  VARIANT 50: note = Any amino acid
  VARIANT 51: note = Any amino acid
  VARIANT 52: note = Any amino acid
  VARIANT 53: note = Any amino acid
GXXXXXXXXXXXXXXXXXXXXXXXXXXXXXXXXGXXXXXXXSNXXXXXXXXXXA

SEQ ID NO: 797291 - protein, 62 aa, unidentified
  VARIANT 2: note = Any amino acid
  VARIANT 3: note = Any amino acid
  VARIANT 4: note = Any amino acid
  VARIANT 5: note = Any amino acid
  VARIANT 6: note = Any amino acid
  VARIANT 7: note = Any amino acid
  VARIANT 8: note = Any amino acid
  VARIANT 9: note = Any amino acid
  VARIANT 10: note = Any amino acid
  VARIANT 11: note = Any amino acid
  VARIANT 12: note = Any amino acid
  VARIANT 13: note = Any amino acid
  VARIANT 14: note = Any amino acid
  VARIANT 15: note = Any amino acid
  VARIANT 16: note = Any amino acid
  VARIANT 17: note = Any amino acid
  VARIANT 18: note = Any amino acid
  VARIANT 19: note = Any amino acid
  VARIANT 20: note = Any amino acid
  VARIANT 21: note = Any amino acid
  VARIANT 22: note = Any amino acid
  VARIANT 23: note = Any amino acid
  VARIANT 24: note = Any amino acid
  VARIANT 25: note = Any amino acid
  VARIANT 26: note = Any amino acid
  VARIANT 27: note = Any amino acid
  VARIANT 28: note = Any amino acid
  VARIANT 29: note = Any amino acid
  VARIANT 30: note = Any amino acid
  VARIANT 31: note = Any amino acid
  VARIANT 32: note = Any amino acid
  VARIANT 33: note = Any amino acid
  VARIANT 34: note = Any amino acid
  VARIANT 35: note = Any amino acid
  VARIANT 36: note = Any amino acid
  VARIANT 37: note = Any amino acid
  VARIANT 38: note = Any amino acid
  VARIANT 39: note = Any amino acid
  VARIANT 40: note = Any amino acid
  VARIANT 42: note = Any amino acid
  VARIANT 43: note = Any amino acid
  VARIANT 44: note = Any amino acid
  VARIANT 45: note = Any amino acid
  VARIANT 46: note = Any amino acid
  VARIANT 47: note = Any amino acid
  VARIANT 48: note = Any amino acid
  VARIANT 51: note = Any amino acid
  VARIANT 52: note = Any amino acid
  VARIANT 53: note = Any amino acid
  VARIANT 54: note = Any amino acid
  VARIANT 55: note = Any amino acid
  VARIANT 56: note = Any amino acid
  VARIANT 57: note = Any amino acid
  VARIANT 58: note = Any amino acid
  VARIANT 59: note = Any amino acid
  VARIANT 60: note = Any amino acid
  VARIANT 61: note = Any amino acid
GXXXXXXXXXXXXXXXXXXXXXXXXXXXXXXXXXXXXXXXGXXXXXXXSGXXXXXXXXXXXG

SEQ ID NO: 797292 - protein, 52 aa, unidentified
  VARIANT 2: note = Any amino acid
  VARIANT 3: note = Any amino acid
  VARIANT 4: note = Any amino acid
  VARIANT 5: note = Any amino acid
  VARIANT 6: note = Any amino acid
  VARIANT 7: note = Any amino acid
  VARIANT 8: note = Any amino acid
  VARIANT 9: note = Any amino acid
  VARIANT 10: note = Any amino acid
  VARIANT 11: note = Any amino acid
  VARIANT 12: note = Any amino acid
  VARIANT 13: note = Any amino acid
  VARIANT 14: note = Any amino acid
  VARIANT 15: note = Any amino acid
  VARIANT 16: note = Any amino acid
  VARIANT 17: note = Any amino acid
  VARIANT 18: note = Any amino acid
  VARIANT 19: note = Any amino acid
  VARIANT 20: note = Any amino acid
  VARIANT 21: note = Any amino acid
  VARIANT 22: note = Any amino acid
  VARIANT 23: note = Any amino acid
  VARIANT 24: note = Any amino acid
  VARIANT 25: note = Any amino acid
  VARIANT 26: note = Any amino acid
  VARIANT 27: note = Any amino acid
  VARIANT 28: note = Any amino acid
  VARIANT 29: note = Any amino acid
  VARIANT 30: note = Any amino acid
  VARIANT 31: note = Any amino acid
  VARIANT 33: note = Any amino acid
  VARIANT 34: note = Any amino acid
  VARIANT 35: note = Any amino acid
  VARIANT 36: note = Any amino acid
  VARIANT 37: note = Any amino acid
  VARIANT 38: note = Any amino acid
  VARIANT 39: note = Any amino acid
  VARIANT 42: note = Any amino acid
  VARIANT 43: note = Any amino acid
  VARIANT 44: note = Any amino acid
  VARIANT 45: note = Any amino acid
  VARIANT 46: note = Any amino acid
  VARIANT 47: note = Any amino acid
  VARIANT 48: note = Any amino acid
  VARIANT 49: note = Any amino acid
  VARIANT 50: note = Any amino acid
  VARIANT 51: note = Any amino acid
VXXXXXXXXXXXXXXXXXXXXXXXXXXXXXXGXXXXXXXSGXXXXXXXXXXC

SEQ ID NO: 797293 - protein, 51 aa, unidentified
  VARIANT 2: note = Any amino acid
  VARIANT 3: note = Any amino acid
  VARIANT 4: note = Any amino acid
  VARIANT 5: note = Any amino acid
  VARIANT 6: note = Any amino acid
  VARIANT 7: note = Any amino acid
  VARIANT 8: note = Any amino acid
  VARIANT 9: note = Any amino acid
  VARIANT 10: note = Any amino acid
  VARIANT 11: note = Any amino acid
  VARIANT 12: note = Any amino acid
  VARIANT 13: note = Any amino acid
  VARIANT 14: note = Any amino acid
  VARIANT 15: note = Any amino acid
  VARIANT 16: note = Any amino acid
  VARIANT 17: note = Any amino acid
  VARIANT 18: note = Any amino acid
  VARIANT 19: note = Any amino acid
  VARIANT 20: note = Any amino acid
  VARIANT 21: note = Any amino acid
  VARIANT 22: note = Any amino acid
  VARIANT 23: note = Any amino acid
  VARIANT 24: note = Any amino acid
  VARIANT 25: note = Any amino acid
  VARIANT 26: note = Any amino acid
  VARIANT 27: note = Any amino acid
  VARIANT 28: note = Any amino acid
  VARIANT 29: note = Any amino acid
  VARIANT 30: note = Any amino acid
  VARIANT 32: note = Any amino acid
  VARIANT 33: note = Any amino acid
  VARIANT 34: note = Any amino acid
  VARIANT 35: note = Any amino acid
  VARIANT 36: note = Any amino acid
  VARIANT 37: note = Any amino acid
  VARIANT 38: note = Any amino acid
  VARIANT 41: note = Any amino acid
  VARIANT 42: note = Any amino acid
  VARIANT 43: note = Any amino acid
  VARIANT 44: note = Any amino acid
  VARIANT 45: note = Any amino acid
  VARIANT 46: note = Any amino acid
  VARIANT 47: note = Any amino acid
  VARIANT 48: note = Any amino acid
  VARIANT 49: note = Any amino acid
  VARIANT 50: note = Any amino acid
AXXXXXXXXXXXXXXXXXXXXXXXXXXXXXGXXXXXXXSGXXXXXXXXXXG

SEQ ID NO: 797294 - protein, 52 aa, unidentified
  VARIANT 2: note = Any amino acid
  VARIANT 3: note = Any amino acid
  VARIANT 4: note = Any amino acid
  VARIANT 5: note = Any amino acid
  VARIANT 6: note = Any amino acid
  VARIANT 7: note = Any amino acid
  VARIANT 8: note = Any amino acid
  VARIANT 9: note = Any amino acid
  VARIANT 10: note = Any amino acid
  VARIANT 11: note = Any amino acid
  VARIANT 12: note = Any amino acid
  VARIANT 13: note = Any amino acid
  VARIANT 14: note = Any amino acid
  VARIANT 15: note = Any amino acid
  VARIANT 16: note = Any amino acid
  VARIANT 17: note = Any amino acid
  VARIANT 18: note = Any amino acid
  VARIANT 19: note = Any amino acid
  VARIANT 20: note = Any amino acid
  VARIANT 21: note = Any amino acid
  VARIANT 22: note = Any amino acid
  VARIANT 23: note = Any amino acid
  VARIANT 24: note = Any amino acid
  VARIANT 25: note = Any amino acid
  VARIANT 26: note = Any amino acid
  VARIANT 27: note = Any amino acid
  VARIANT 28: note = Any amino acid
  VARIANT 29: note = Any amino acid
  VARIANT 30: note = Any amino acid
  VARIANT 32: note = Any amino acid
  VARIANT 33: note = Any amino acid
  VARIANT 34: note = Any amino acid
  VARIANT 35: note = Any amino acid
  VARIANT 36: note = Any amino acid
  VARIANT 37: note = Any amino acid
  VARIANT 38: note = Any amino acid
  VARIANT 41: note = Any amino acid
  VARIANT 42: note = Any amino acid
  VARIANT 43: note = Any amino acid
  VARIANT 44: note = Any amino acid
  VARIANT 45: note = Any amino acid
  VARIANT 46: note = Any amino acid
  VARIANT 47: note = Any amino acid
  VARIANT 48: note = Any amino acid
  VARIANT 49: note = Any amino acid
  VARIANT 50: note = Any amino acid
  VARIANT 51: note = Any amino acid
FXXXXXXXXXXXXXXXXXXXXXXXXXXXXXGXXXXXXXSGXXXXXXXXXXXG

SEQ ID NO: 797295 - protein, 50 aa, unidentified
  VARIANT 2: note = Any amino acid
  VARIANT 3: note = Any amino acid
  VARIANT 4: note = Any amino acid
  VARIANT 5: note = Any amino acid
  VARIANT 6: note = Any amino acid
  VARIANT 7: note = Any amino acid
  VARIANT 8: note = Any amino acid
  VARIANT 9: note = Any amino acid
  VARIANT 10: note = Any amino acid
  VARIANT 11: note = Any amino acid
  VARIANT 12: note = Any amino acid
  VARIANT 13: note = Any amino acid
  VARIANT 14: note = Any amino acid
  VARIANT 15: note = Any amino acid
  VARIANT 16: note = Any amino acid
  VARIANT 17: note = Any amino acid
  VARIANT 18: note = Any amino acid
  VARIANT 19: note = Any amino acid
  VARIANT 20: note = Any amino acid
  VARIANT 21: note = Any amino acid
  VARIANT 22: note = Any amino acid
  VARIANT 23: note = Any amino acid
  VARIANT 24: note = Any amino acid
  VARIANT 25: note = Any amino acid
  VARIANT 26: note = Any amino acid
  VARIANT 27: note = Any amino acid
  VARIANT 28: note = Any amino acid
  VARIANT 29: note = Any amino acid
  VARIANT 31: note = Any amino acid
  VARIANT 32: note = Any amino acid
  VARIANT 33: note = Any amino acid
  VARIANT 34: note = Any amino acid
  VARIANT 35: note = Any amino acid
  VARIANT 36: note = Any amino acid
  VARIANT 37: note = Any amino acid
  VARIANT 40: note = Any amino acid
  VARIANT 41: note = Any amino acid
  VARIANT 42: note = Any amino acid
  VARIANT 43: note = Any amino acid
  VARIANT 44: note = Any amino acid
  VARIANT 45: note = Any amino acid
  VARIANT 46: note = Any amino acid
  VARIANT 47: note = Any amino acid
  VARIANT 48: note = Any amino acid
  VARIANT 49: note = Any amino acid
GXXXXXXXXXXXXXXXXXXXXXXXXXXXXAXXXXXXXSGXXXXXXXXXXG

SEQ ID NO: 797296 - protein, 52 aa, unidentified
  VARIANT 2: note = Any amino acid
  VARIANT 3: note = Any amino acid
  VARIANT 4: note = Any amino acid
  VARIANT 5: note = Any amino acid
  VARIANT 6: note = Any amino acid
  VARIANT 7: note = Any amino acid
  VARIANT 8: note = Any amino acid
  VARIANT 9: note = Any amino acid
  VARIANT 10: note = Any amino acid
  VARIANT 11: note = Any amino acid
  VARIANT 12: note = Any amino acid
  VARIANT 13: note = Any amino acid
  VARIANT 14: note = Any amino acid
  VARIANT 15: note = Any amino acid
  VARIANT 16: note = Any amino acid
  VARIANT 17: note = Any amino acid
  VARIANT 18: note = Any amino acid
  VARIANT 19: note = Any amino acid
  VARIANT 20: note = Any amino acid
  VARIANT 21: note = Any amino acid
  VARIANT 22: note = Any amino acid
  VARIANT 23: note = Any amino acid
  VARIANT 24: note = Any amino acid
  VARIANT 25: note = Any amino acid
  VARIANT 26: note = Any amino acid
  VARIANT 27: note = Any amino acid
  VARIANT 28: note = Any amino acid
  VARIANT 29: note = Any amino acid
  VARIANT 30: note = Any amino acid
  VARIANT 31: note = Any amino acid
  VARIANT 33: note = Any amino acid
  VARIANT 34: note = Any amino acid
  VARIANT 35: note = Any amino acid
  VARIANT 36: note = Any amino acid
  VARIANT 37: note = Any amino acid
  VARIANT 38: note = Any amino acid
  VARIANT 39: note = Any amino acid
  VARIANT 42: note = Any amino acid
  VARIANT 43: note = Any amino acid
  VARIANT 44: note = Any amino acid
  VARIANT 45: note = Any amino acid
  VARIANT 46: note = Any amino acid
  VARIANT 47: note = Any amino acid
  VARIANT 48: note = Any amino acid
  VARIANT 49: note = Any amino acid
  VARIANT 50: note = Any amino acid
  VARIANT 51: note = Any amino acid
GXXXXXXXXXXXXXXXXXXXXXXXXXXXXXXCXXXXXXXSGXXXXXXXXXXT

SEQ ID NO: 797297 - protein, 51 aa, unidentified
  VARIANT 2: note = Any amino acid
  VARIANT 3: note = Any amino acid
  VARIANT 4: note = Any amino acid
  VARIANT 5: note = Any amino acid
  VARIANT 6: note = Any amino acid
  VARIANT 7: note = Any amino acid
  VARIANT 8: note = Any amino acid
  VARIANT 9: note = Any amino acid
  VARIANT 10: note = Any amino acid
  VARIANT 11: note = Any amino acid
  VARIANT 12: note = Any amino acid
  VARIANT 13: note = Any amino acid
  VARIANT 14: note = Any amino acid
  VARIANT 15: note = Any amino acid
  VARIANT 16: note = Any amino acid
  VARIANT 17: note = Any amino acid
  VARIANT 18: note = Any amino acid
  VARIANT 19: note = Any amino acid
  VARIANT 20: note = Any amino acid
  VARIANT 21: note = Any amino acid
  VARIANT 22: note = Any amino acid
  VARIANT 23: note = Any amino acid
  VARIANT 24: note = Any amino acid
  VARIANT 25: note = Any amino acid
  VARIANT 26: note = Any amino acid
  VARIANT 27: note = Any amino acid
  VARIANT 28: note = Any amino acid
  VARIANT 29: note = Any amino acid
  VARIANT 30: note = Any amino acid
  VARIANT 31: note = Any amino acid
  VARIANT 33: note = Any amino acid
  VARIANT 34: note = Any amino acid
  VARIANT 35: note = Any amino acid
  VARIANT 36: note = Any amino acid
  VARIANT 37: note = Any amino acid
  VARIANT 38: note = Any amino acid
  VARIANT 39: note = Any amino acid
  VARIANT 42: note = Any amino acid
  VARIANT 43: note = Any amino acid
  VARIANT 44: note = Any amino acid
  VARIANT 45: note = Any amino acid
  VARIANT 46: note = Any amino acid
  VARIANT 47: note = Any amino acid
  VARIANT 48: note = Any amino acid
  VARIANT 49: note = Any amino acid
  VARIANT 50: note = Any amino acid
GXXXXXXXXXXXXXXXXXXXXXXXXXXXXXXGXXXXXXXSGXXXXXXXXXR

SEQ ID NO: 797298 - protein, 52 aa, unidentified
  VARIANT 2: note = Any amino acid
  VARIANT 3: note = Any amino acid
  VARIANT 4: note = Any amino acid
  VARIANT 5: note = Any amino acid
  VARIANT 6: note = Any amino acid
  VARIANT 7: note = Any amino acid
  VARIANT 8: note = Any amino acid
  VARIANT 9: note = Any amino acid
  VARIANT 10: note = Any amino acid
  VARIANT 11: note = Any amino acid
  VARIANT 12: note = Any amino acid
  VARIANT 13: note = Any amino acid
  VARIANT 14: note = Any amino acid
  VARIANT 15: note = Any amino acid
  VARIANT 16: note = Any amino acid
  VARIANT 17: note = Any amino acid
  VARIANT 18: note = Any amino acid
  VARIANT 19: note = Any amino acid
  VARIANT 20: note = Any amino acid
  VARIANT 21: note = Any amino acid
  VARIANT 22: note = Any amino acid
  VARIANT 23: note = Any amino acid
  VARIANT 24: note = Any amino acid
  VARIANT 25: note = Any amino acid
  VARIANT 26: note = Any amino acid
  VARIANT 27: note = Any amino acid
  VARIANT 28: note = Any amino acid
  VARIANT 29: note = Any amino acid
  VARIANT 30: note = Any amino acid
  VARIANT 31: note = Any amino acid
  VARIANT 33: note = Any amino acid
  VARIANT 34: note = Any amino acid
  VARIANT 35: note = Any amino acid
  VARIANT 36: note = Any amino acid
  VARIANT 37: note = Any amino acid
  VARIANT 38: note = Any amino acid
  VARIANT 39: note = Any amino acid
  VARIANT 42: note = Any amino acid
  VARIANT 43: note = Any amino acid
  VARIANT 44: note = Any amino acid
  VARIANT 45: note = Any amino acid
  VARIANT 46: note = Any amino acid
  VARIANT 47: note = Any amino acid
  VARIANT 48: note = Any amino acid
  VARIANT 49: note = Any amino acid
  VARIANT 50: note = Any amino acid
  VARIANT 51: note = Any amino acid
GXXXXXXXXXXXXXXXXXXXXXXXXXXXXXXTXXXXXXXTGXXXXXXXXXXS

SEQ ID NO: 797299 - protein, 53 aa, unidentified
  VARIANT 2: note = Any amino acid
  VARIANT 3: note = Any amino acid
  VARIANT 4: note = Any amino acid
  VARIANT 5: note = Any amino acid
  VARIANT 6: note = Any amino acid
  VARIANT 7: note = Any amino acid
  VARIANT 8: note = Any amino acid
  VARIANT 9: note = Any amino acid
  VARIANT 10: note = Any amino acid
  VARIANT 11: note = Any amino acid
  VARIANT 12: note = Any amino acid
  VARIANT 13: note = Any amino acid
  VARIANT 14: note = Any amino acid
  VARIANT 15: note = Any amino acid
  VARIANT 16: note = Any amino acid
  VARIANT 17: note = Any amino acid
  VARIANT 18: note = Any amino acid
  VARIANT 19: note = Any amino acid
  VARIANT 20: note = Any amino acid
  VARIANT 21: note = Any amino acid
  VARIANT 22: note = Any amino acid
  VARIANT 23: note = Any amino acid
  VARIANT 24: note = Any amino acid
  VARIANT 25: note = Any amino acid
  VARIANT 26: note = Any amino acid
  VARIANT 27: note = Any amino acid
  VARIANT 28: note = Any amino acid
  VARIANT 29: note = Any amino acid
  VARIANT 30: note = Any amino acid
  VARIANT 31: note = Any amino acid
  VARIANT 32: note = Any amino acid
  VARIANT 34: note = Any amino acid
  VARIANT 35: note = Any amino acid
  VARIANT 36: note = Any amino acid
  VARIANT 37: note = Any amino acid
  VARIANT 38: note = Any amino acid
  VARIANT 39: note = Any amino acid
  VARIANT 40: note = Any amino acid
  VARIANT 43: note = Any amino acid
  VARIANT 44: note = Any amino acid
  VARIANT 45: note = Any amino acid
  VARIANT 46: note = Any amino acid
  VARIANT 47: note = Any amino acid
  VARIANT 48: note = Any amino acid
  VARIANT 49: note = Any amino acid
  VARIANT 50: note = Any amino acid
  VARIANT 51: note = Any amino acid
  VARIANT 52: note = Any amino acid
GXXXXXXXXXXXXXXXXXXXXXXXXXXXXXXXGXXXXXXXSGXXXXXXXXXXS

SEQ ID NO: 797300 - protein, 54 aa, unidentified
  VARIANT 2: note = Any amino acid
  VARIANT 3: note = Any amino acid
  VARIANT 4: note = Any amino acid
  VARIANT 5: note = Any amino acid
  VARIANT 6: note = Any amino acid
  VARIANT 7: note = Any amino acid
  VARIANT 8: note = Any amino acid
  VARIANT 9: note = Any amino acid
  VARIANT 10: note = Any amino acid
  VARIANT 11: note = Any amino acid
  VARIANT 12: note = Any amino acid
  VARIANT 13: note = Any amino acid
  VARIANT 14: note = Any amino acid
  VARIANT 15: note = Any amino acid
  VARIANT 16: note = Any amino acid
  VARIANT 17: note = Any amino acid
  VARIANT 18: note = Any amino acid
  VARIANT 19: note = Any amino acid
  VARIANT 20: note = Any amino acid
  VARIANT 21: note = Any amino acid
  VARIANT 22: note = Any amino acid
  VARIANT 23: note = Any amino acid
  VARIANT 24: note = Any amino acid
  VARIANT 25: note = Any amino acid
  VARIANT 26: note = Any amino acid
  VARIANT 27: note = Any amino acid
  VARIANT 28: note = Any amino acid
  VARIANT 29: note = Any amino acid
  VARIANT 30: note = Any amino acid
  VARIANT 31: note = Any amino acid
  VARIANT 32: note = Any amino acid
  VARIANT 33: note = Any amino acid
  VARIANT 35: note = Any amino acid
  VARIANT 36: note = Any amino acid
  VARIANT 37: note = Any amino acid
  VARIANT 38: note = Any amino acid
  VARIANT 39: note = Any amino acid
  VARIANT 40: note = Any amino acid
  VARIANT 41: note = Any amino acid
  VARIANT 44: note = Any amino acid
  VARIANT 45: note = Any amino acid
  VARIANT 46: note = Any amino acid
  VARIANT 47: note = Any amino acid
  VARIANT 48: note = Any amino acid
  VARIANT 49: note = Any amino acid
  VARIANT 50: note = Any amino acid
  VARIANT 51: note = Any amino acid
  VARIANT 52: note = Any amino acid
  VARIANT 53: note = Any amino acid
GXXXXXXXXXXXXXXXXXXXXXXXXXXXXXXXXGXXXXXXXSAXXXXXXXXXXA

SEQ ID NO: 797301 - protein, 51 aa, unidentified
  VARIANT 2: note = Any amino acid
  VARIANT 3: note = Any amino acid
  VARIANT 4: note = Any amino acid
  VARIANT 5: note = Any amino acid
  VARIANT 6: note = Any amino acid
  VARIANT 7: note = Any amino acid
  VARIANT 8: note = Any amino acid
  VARIANT 9: note = Any amino acid
  VARIANT 10: note = Any amino acid
  VARIANT 11: note = Any amino acid
  VARIANT 12: note = Any amino acid
  VARIANT 13: note = Any amino acid
  VARIANT 14: note = Any amino acid
  VARIANT 15: note = Any amino acid
  VARIANT 16: note = Any amino acid
  VARIANT 17: note = Any amino acid
  VARIANT 18: note = Any amino acid
  VARIANT 19: note = Any amino acid
  VARIANT 20: note = Any amino acid
  VARIANT 21: note = Any amino acid
  VARIANT 22: note = Any amino acid
  VARIANT 23: note = Any amino acid
  VARIANT 24: note = Any amino acid
  VARIANT 25: note = Any amino acid
  VARIANT 26: note = Any amino acid
  VARIANT 27: note = Any amino acid
  VARIANT 28: note = Any amino acid
  VARIANT 29: note = Any amino acid
  VARIANT 30: note = Any amino acid
  VARIANT 31: note = Any amino acid
  VARIANT 33: note = Any amino acid
  VARIANT 34: note = Any amino acid
  VARIANT 35: note = Any amino acid
  VARIANT 36: note = Any amino acid
  VARIANT 37: note = Any amino acid
  VARIANT 38: note = Any amino acid
  VARIANT 39: note = Any amino acid
  VARIANT 42: note = Any amino acid
  VARIANT 43: note = Any amino acid
  VARIANT 44: note = Any amino acid
  VARIANT 45: note = Any amino acid
  VARIANT 46: note = Any amino acid
  VARIANT 47: note = Any amino acid
  VARIANT 48: note = Any amino acid
  VARIANT 49: note = Any amino acid
  VARIANT 50: note = Any amino acid
AXXXXXXXXXXXXXXXXXXXXXXXXXXXXXXGXXXXXXXSGXXXXXXXXXR

SEQ ID NO: 797302 - protein, 52 aa, unidentified
  VARIANT 2: note = Any amino acid
  VARIANT 3: note = Any amino acid
  VARIANT 4: note = Any amino acid
  VARIANT 5: note = Any amino acid
  VARIANT 6: note = Any amino acid
  VARIANT 7: note = Any amino acid
  VARIANT 8: note = Any amino acid
  VARIANT 9: note = Any amino acid
  VARIANT 10: note = Any amino acid
  VARIANT 11: note = Any amino acid
  VARIANT 12: note = Any amino acid
  VARIANT 13: note = Any amino acid
  VARIANT 14: note = Any amino acid
  VARIANT 15: note = Any amino acid
  VARIANT 16: note = Any amino acid
  VARIANT 17: note = Any amino acid
  VARIANT 18: note = Any amino acid
  VARIANT 19: note = Any amino acid
  VARIANT 20: note = Any amino acid
  VARIANT 21: note = Any amino acid
  VARIANT 22: note = Any amino acid
  VARIANT 23: note = Any amino acid
  VARIANT 24: note = Any amino acid
  VARIANT 25: note = Any amino acid
  VARIANT 26: note = Any amino acid
  VARIANT 27: note = Any amino acid
  VARIANT 28: note = Any amino acid
  VARIANT 29: note = Any amino acid
  VARIANT 30: note = Any amino acid
  VARIANT 32: note = Any amino acid
  VARIANT 33: note = Any amino acid
  VARIANT 34: note = Any amino acid
  VARIANT 35: note = Any amino acid
  VARIANT 36: note = Any amino acid
  VARIANT 37: note = Any amino acid
  VARIANT 38: note = Any amino acid
  VARIANT 41: note = Any amino acid
  VARIANT 42: note = Any amino acid
  VARIANT 43: note = Any amino acid
  VARIANT 44: note = Any amino acid
  VARIANT 45: note = Any amino acid
  VARIANT 46: note = Any amino acid
  VARIANT 47: note = Any amino acid
  VARIANT 48: note = Any amino acid
  VARIANT 49: note = Any amino acid
  VARIANT 50: note = Any amino acid
  VARIANT 51: note = Any amino acid
CXXXXXXXXXXXXXXXXXXXXXXXXXXXXXGXXXXXXXSGXXXXXXXXXXXA

SEQ ID NO: 797303 - protein, 49 aa, unidentified
  VARIANT 2: note = Any amino acid
  VARIANT 3: note = Any amino acid
  VARIANT 4: note = Any amino acid
  VARIANT 5: note = Any amino acid
  VARIANT 6: note = Any amino acid
  VARIANT 7: note = Any amino acid
  VARIANT 8: note = Any amino acid
  VARIANT 9: note = Any amino acid
  VARIANT 10: note = Any amino acid
  VARIANT 11: note = Any amino acid
  VARIANT 12: note = Any amino acid
  VARIANT 13: note = Any amino acid
  VARIANT 14: note = Any amino acid
  VARIANT 15: note = Any amino acid
  VARIANT 16: note = Any amino acid
  VARIANT 17: note = Any amino acid
  VARIANT 18: note = Any amino acid
  VARIANT 19: note = Any amino acid
  VARIANT 20: note = Any amino acid
  VARIANT 21: note = Any amino acid
  VARIANT 22: note = Any amino acid
  VARIANT 23: note = Any amino acid
  VARIANT 24: note = Any amino acid
  VARIANT 25: note = Any amino acid
  VARIANT 26: note = Any amino acid
  VARIANT 27: note = Any amino acid
  VARIANT 28: note = Any amino acid
  VARIANT 29: note = Any amino acid
  VARIANT 31: note = Any amino acid
  VARIANT 32: note = Any amino acid
  VARIANT 33: note = Any amino acid
  VARIANT 34: note = Any amino acid
  VARIANT 35: note = Any amino acid
  VARIANT 36: note = Any amino acid
  VARIANT 37: note = Any amino acid
  VARIANT 40: note = Any amino acid
  VARIANT 41: note = Any amino acid
  VARIANT 42: note = Any amino acid
  VARIANT 43: note = Any amino acid
  VARIANT 44: note = Any amino acid
  VARIANT 45: note = Any amino acid
  VARIANT 46: note = Any amino acid
  VARIANT 47: note = Any amino acid
  VARIANT 48: note = Any amino acid
GXXXXXXXXXXXXXXXXXXXXXXXXXXXXGXXXXXXXSGXXXXXXXXXG

SEQ ID NO: 797304 - protein, 53 aa, unidentified
  VARIANT 2: note = Any amino acid
  VARIANT 3: note = Any amino acid
  VARIANT 4: note = Any amino acid
  VARIANT 5: note = Any amino acid
  VARIANT 6: note = Any amino acid
  VARIANT 7: note = Any amino acid
  VARIANT 8: note = Any amino acid
  VARIANT 9: note = Any amino acid
  VARIANT 10: note = Any amino acid
  VARIANT 11: note = Any amino acid
  VARIANT 12: note = Any amino acid
  VARIANT 13: note = Any amino acid
  VARIANT 14: note = Any amino acid
  VARIANT 15: note = Any amino acid
  VARIANT 16: note = Any amino acid
  VARIANT 17: note = Any amino acid
  VARIANT 18: note = Any amino acid
  VARIANT 19: note = Any amino acid
  VARIANT 20: note = Any amino acid
  VARIANT 21: note = Any amino acid
  VARIANT 22: note = Any amino acid
  VARIANT 23: note = Any amino acid
  VARIANT 24: note = Any amino acid
  VARIANT 25: note = Any amino acid
  VARIANT 26: note = Any amino acid
  VARIANT 27: note = Any amino acid
  VARIANT 28: note = Any amino acid
  VARIANT 29: note = Any amino acid
  VARIANT 30: note = Any amino acid
  VARIANT 32: note = Any amino acid
  VARIANT 33: note = Any amino acid
  VARIANT 34: note = Any amino acid
  VARIANT 35: note = Any amino acid
  VARIANT 36: note = Any amino acid
  VARIANT 37: note = Any amino acid
  VARIANT 38: note = Any amino acid
  VARIANT 41: note = Any amino acid
  VARIANT 42: note = Any amino acid
  VARIANT 43: note = Any amino acid
  VARIANT 44: note = Any amino acid
  VARIANT 45: note = Any amino acid
  VARIANT 46: note = Any amino acid
  VARIANT 47: note = Any amino acid
  VARIANT 48: note = Any amino acid
  VARIANT 49: note = Any amino acid
  VARIANT 50: note = Any amino acid
  VARIANT 51: note = Any amino acid
  VARIANT 52: note = Any amino acid
GXXXXXXXXXXXXXXXXXXXXXXXXXXXXXGXXXXXXXTAXXXXXXXXXXXXG

SEQ ID NO: 797305 - protein, 51 aa, unidentified
  VARIANT 2: note = Any amino acid
  VARIANT 3: note = Any amino acid
  VARIANT 4: note = Any amino acid
  VARIANT 5: note = Any amino acid
  VARIANT 6: note = Any amino acid
  VARIANT 7: note = Any amino acid
  VARIANT 8: note = Any amino acid
  VARIANT 9: note = Any amino acid
  VARIANT 10: note = Any amino acid
  VARIANT 11: note = Any amino acid
  VARIANT 12: note = Any amino acid
  VARIANT 13: note = Any amino acid
  VARIANT 14: note = Any amino acid
  VARIANT 15: note = Any amino acid
  VARIANT 16: note = Any amino acid
  VARIANT 17: note = Any amino acid
  VARIANT 18: note = Any amino acid
  VARIANT 19: note = Any amino acid
  VARIANT 20: note = Any amino acid
  VARIANT 21: note = Any amino acid
  VARIANT 22: note = Any amino acid
  VARIANT 23: note = Any amino acid
  VARIANT 24: note = Any amino acid
  VARIANT 25: note = Any amino acid
  VARIANT 26: note = Any amino acid
  VARIANT 27: note = Any amino acid
  VARIANT 28: note = Any amino acid
  VARIANT 29: note = Any amino acid
  VARIANT 30: note = Any amino acid
  VARIANT 32: note = Any amino acid
  VARIANT 33: note = Any amino acid
  VARIANT 34: note = Any amino acid
  VARIANT 35: note = Any amino acid
  VARIANT 36: note = Any amino acid
  VARIANT 37: note = Any amino acid
  VARIANT 38: note = Any amino acid
  VARIANT 41: note = Any amino acid
  VARIANT 42: note = Any amino acid
  VARIANT 43: note = Any amino acid
  VARIANT 44: note = Any amino acid
  VARIANT 45: note = Any amino acid
  VARIANT 46: note = Any amino acid
  VARIANT 47: note = Any amino acid
  VARIANT 48: note = Any amino acid
  VARIANT 49: note = Any amino acid
  VARIANT 50: note = Any amino acid
GXXXXXXXXXXXXXXXXXXXXXXXXXXXXXGXXXXXXXTGXXXXXXXXXXY

SEQ ID NO: 797306 - protein, 52 aa, unidentified
  VARIANT 2: note = Any amino acid
  VARIANT 3: note = Any amino acid
  VARIANT 4: note = Any amino acid
  VARIANT 5: note = Any amino acid
  VARIANT 6: note = Any amino acid
  VARIANT 7: note = Any amino acid
  VARIANT 8: note = Any amino acid
  VARIANT 9: note = Any amino acid
  VARIANT 10: note = Any amino acid
  VARIANT 11: note = Any amino acid
  VARIANT 12: note = Any amino acid
  VARIANT 13: note = Any amino acid
  VARIANT 14: note = Any amino acid
  VARIANT 15: note = Any amino acid
  VARIANT 16: note = Any amino acid
  VARIANT 17: note = Any amino acid
  VARIANT 18: note = Any amino acid
  VARIANT 19: note = Any amino acid
  VARIANT 20: note = Any amino acid
  VARIANT 21: note = Any amino acid
  VARIANT 22: note = Any amino acid
  VARIANT 23: note = Any amino acid
  VARIANT 24: note = Any amino acid
  VARIANT 25: note = Any amino acid
  VARIANT 26: note = Any amino acid
  VARIANT 27: note = Any amino acid
  VARIANT 28: note = Any amino acid
  VARIANT 29: note = Any amino acid
  VARIANT 30: note = Any amino acid
  VARIANT 31: note = Any amino acid
  VARIANT 33: note = Any amino acid
  VARIANT 34: note = Any amino acid
  VARIANT 35: note = Any amino acid
  VARIANT 36: note = Any amino acid
  VARIANT 37: note = Any amino acid
  VARIANT 38: note = Any amino acid
  VARIANT 39: note = Any amino acid
  VARIANT 42: note = Any amino acid
  VARIANT 43: note = Any amino acid
  VARIANT 44: note = Any amino acid
  VARIANT 45: note = Any amino acid
  VARIANT 46: note = Any amino acid
  VARIANT 47: note = Any amino acid
  VARIANT 48: note = Any amino acid
  VARIANT 49: note = Any amino acid
  VARIANT 50: note = Any amino acid
  VARIANT 51: note = Any amino acid
GXXXXXXXXXXXXXXXXXXXXXXXXXXXXXXGXXXXXXXSAXXXXXXXXXXV

SEQ ID NO: 797307 - protein, 53 aa, unidentified
  VARIANT 2: note = Any amino acid
  VARIANT 3: note = Any amino acid
  VARIANT 4: note = Any amino acid
  VARIANT 5: note = Any amino acid
  VARIANT 6: note = Any amino acid
  VARIANT 7: note = Any amino acid
  VARIANT 8: note = Any amino acid
  VARIANT 9: note = Any amino acid
  VARIANT 10: note = Any amino acid
  VARIANT 11: note = Any amino acid
  VARIANT 12: note = Any amino acid
  VARIANT 13: note = Any amino acid
  VARIANT 14: note = Any amino acid
  VARIANT 15: note = Any amino acid
  VARIANT 16: note = Any amino acid
  VARIANT 17: note = Any amino acid
  VARIANT 18: note = Any amino acid
  VARIANT 19: note = Any amino acid
  VARIANT 20: note = Any amino acid
  VARIANT 21: note = Any amino acid
  VARIANT 22: note = Any amino acid
  VARIANT 23: note = Any amino acid
  VARIANT 24: note = Any amino acid
  VARIANT 25: note = Any amino acid
  VARIANT 26: note = Any amino acid
  VARIANT 27: note = Any amino acid
  VARIANT 28: note = Any amino acid
  VARIANT 29: note = Any amino acid
  VARIANT 30: note = Any amino acid
  VARIANT 32: note = Any amino acid
  VARIANT 33: note = Any amino acid
  VARIANT 34: note = Any amino acid
  VARIANT 35: note = Any amino acid
  VARIANT 36: note = Any amino acid
  VARIANT 37: note = Any amino acid
  VARIANT 38: note = Any amino acid
  VARIANT 41: note = Any amino acid
  VARIANT 42: note = Any amino acid
  VARIANT 43: note = Any amino acid
  VARIANT 44: note = Any amino acid
  VARIANT 45: note = Any amino acid
  VARIANT 46: note = Any amino acid
  VARIANT 47: note = Any amino acid
  VARIANT 48: note = Any amino acid
  VARIANT 49: note = Any amino acid
  VARIANT 50: note = Any amino acid
  VARIANT 51: note = Any amino acid
  VARIANT 52: note = Any amino acid
DXXXXXXXXXXXXXXXXXXXXXXXXXXXXXGXXXXXXXSGXXXXXXXXXXXXG

SEQ ID NO: 797308 - protein, 51 aa, unidentified
  VARIANT 2: note = Any amino acid
  VARIANT 3: note = Any amino acid
  VARIANT 4: note = Any amino acid
  VARIANT 5: note = Any amino acid
  VARIANT 6: note = Any amino acid
  VARIANT 7: note = Any amino acid
  VARIANT 8: note = Any amino acid
  VARIANT 9: note = Any amino acid
  VARIANT 10: note = Any amino acid
  VARIANT 11: note = Any amino acid
  VARIANT 12: note = Any amino acid
  VARIANT 13: note = Any amino acid
  VARIANT 14: note = Any amino acid
  VARIANT 15: note = Any amino acid
  VARIANT 16: note = Any amino acid
  VARIANT 17: note = Any amino acid
  VARIANT 18: note = Any amino acid
  VARIANT 19: note = Any amino acid
  VARIANT 20: note = Any amino acid
  VARIANT 21: note = Any amino acid
  VARIANT 22: note = Any amino acid
  VARIANT 23: note = Any amino acid
  VARIANT 24: note = Any amino acid
  VARIANT 25: note = Any amino acid
  VARIANT 26: note = Any amino acid
  VARIANT 27: note = Any amino acid
  VARIANT 28: note = Any amino acid
  VARIANT 29: note = Any amino acid
  VARIANT 30: note = Any amino acid
  VARIANT 32: note = Any amino acid
  VARIANT 33: note = Any amino acid
  VARIANT 34: note = Any amino acid
  VARIANT 35: note = Any amino acid
  VARIANT 36: note = Any amino acid
  VARIANT 37: note = Any amino acid
  VARIANT 38: note = Any amino acid
  VARIANT 41: note = Any amino acid
  VARIANT 42: note = Any amino acid
  VARIANT 43: note = Any amino acid
  VARIANT 44: note = Any amino acid
  VARIANT 45: note = Any amino acid
  VARIANT 46: note = Any amino acid
  VARIANT 47: note = Any amino acid
  VARIANT 48: note = Any amino acid
  VARIANT 49: note = Any amino acid
  VARIANT 50: note = Any amino acid
GXXXXXXXXXXXXXXXXXXXXXXXXXXXXXGXXXXXXXTAXXXXXXXXXXG

SEQ ID NO: 797309 - protein, 52 aa, unidentified
  VARIANT 2: note = Any amino acid
  VARIANT 3: note = Any amino acid
  VARIANT 4: note = Any amino acid
  VARIANT 5: note = Any amino acid
  VARIANT 6: note = Any amino acid
  VARIANT 7: note = Any amino acid
  VARIANT 8: note = Any amino acid
  VARIANT 9: note = Any amino acid
  VARIANT 10: note = Any amino acid
  VARIANT 11: note = Any amino acid
  VARIANT 12: note = Any amino acid
  VARIANT 13: note = Any amino acid
  VARIANT 14: note = Any amino acid
  VARIANT 15: note = Any amino acid
  VARIANT 16: note = Any amino acid
  VARIANT 17: note = Any amino acid
  VARIANT 18: note = Any amino acid
  VARIANT 19: note = Any amino acid
  VARIANT 20: note = Any amino acid
  VARIANT 21: note = Any amino acid
  VARIANT 22: note = Any amino acid
  VARIANT 23: note = Any amino acid
  VARIANT 24: note = Any amino acid
  VARIANT 25: note = Any amino acid
  VARIANT 26: note = Any amino acid
  VARIANT 27: note = Any amino acid
  VARIANT 28: note = Any amino acid
  VARIANT 29: note = Any amino acid
  VARIANT 30: note = Any amino acid
  VARIANT 31: note = Any amino acid
  VARIANT 33: note = Any amino acid
  VARIANT 34: note = Any amino acid
  VARIANT 35: note = Any amino acid
  VARIANT 36: note = Any amino acid
  VARIANT 37: note = Any amino acid
  VARIANT 38: note = Any amino acid
  VARIANT 39: note = Any amino acid
  VARIANT 42: note = Any amino acid
  VARIANT 43: note = Any amino acid
  VARIANT 44: note = Any amino acid
  VARIANT 45: note = Any amino acid
  VARIANT 46: note = Any amino acid
  VARIANT 47: note = Any amino acid
  VARIANT 48: note = Any amino acid
  VARIANT 49: note = Any amino acid
  VARIANT 50: note = Any amino acid
  VARIANT 51: note = Any amino acid
GXXXXXXXXXXXXXXXXXXXXXXXXXXXXXXAXXXXXXXTGXXXXXXXXXXG

SEQ ID NO: 797310 - protein, 52 aa, unidentified
  VARIANT 2: note = Any amino acid
  VARIANT 3: note = Any amino acid
  VARIANT 4: note = Any amino acid
  VARIANT 5: note = Any amino acid
  VARIANT 6: note = Any amino acid
  VARIANT 7: note = Any amino acid
  VARIANT 8: note = Any amino acid
  VARIANT 9: note = Any amino acid
  VARIANT 10: note = Any amino acid
  VARIANT 11: note = Any amino acid
  VARIANT 12: note = Any amino acid
  VARIANT 13: note = Any amino acid
  VARIANT 14: note = Any amino acid
  VARIANT 15: note = Any amino acid
  VARIANT 16: note = Any amino acid
  VARIANT 17: note = Any amino acid
  VARIANT 18: note = Any amino acid
  VARIANT 19: note = Any amino acid
  VARIANT 20: note = Any amino acid
  VARIANT 21: note = Any amino acid
  VARIANT 22: note = Any amino acid
  VARIANT 23: note = Any amino acid
  VARIANT 24: note = Any amino acid
  VARIANT 25: note = Any amino acid
  VARIANT 26: note = Any amino acid
  VARIANT 27: note = Any amino acid
  VARIANT 28: note = Any amino acid
  VARIANT 29: note = Any amino acid
  VARIANT 30: note = Any amino acid
  VARIANT 31: note = Any amino acid
  VARIANT 33: note = Any amino acid
  VARIANT 34: note = Any amino acid
  VARIANT 35: note = Any amino acid
  VARIANT 36: note = Any amino acid
  VARIANT 37: note = Any amino acid
  VARIANT 38: note = Any amino acid
  VARIANT 39: note = Any amino acid
  VARIANT 42: note = Any amino acid
  VARIANT 43: note = Any amino acid
  VARIANT 44: note = Any amino acid
  VARIANT 45: note = Any amino acid
  VARIANT 46: note = Any amino acid
  VARIANT 47: note = Any amino acid
  VARIANT 48: note = Any amino acid
  VARIANT 49: note = Any amino acid
  VARIANT 50: note = Any amino acid
  VARIANT 51: note = Any amino acid
GXXXXXXXXXXXXXXXXXXXXXXXXXXXXXXGXXXXXXXSGXXXXXXXXXXH

SEQ ID NO: 797311 - protein, 53 aa, unidentified
  VARIANT 2: note = Any amino acid
  VARIANT 3: note = Any amino acid
  VARIANT 4: note = Any amino acid
  VARIANT 5: note = Any amino acid
  VARIANT 6: note = Any amino acid
  VARIANT 7: note = Any amino acid
  VARIANT 8: note = Any amino acid
  VARIANT 9: note = Any amino acid
  VARIANT 10: note = Any amino acid
  VARIANT 11: note = Any amino acid
  VARIANT 12: note = Any amino acid
  VARIANT 13: note = Any amino acid
  VARIANT 14: note = Any amino acid
  VARIANT 15: note = Any amino acid
  VARIANT 16: note = Any amino acid
  VARIANT 17: note = Any amino acid
  VARIANT 18: note = Any amino acid
  VARIANT 19: note = Any amino acid
  VARIANT 20: note = Any amino acid
  VARIANT 21: note = Any amino acid
  VARIANT 22: note = Any amino acid
  VARIANT 23: note = Any amino acid
  VARIANT 24: note = Any amino acid
  VARIANT 25: note = Any amino acid
  VARIANT 26: note = Any amino acid
  VARIANT 27: note = Any amino acid
  VARIANT 28: note = Any amino acid
  VARIANT 29: note = Any amino acid
  VARIANT 30: note = Any amino acid
  VARIANT 31: note = Any amino acid
  VARIANT 33: note = Any amino acid
  VARIANT 34: note = Any amino acid
  VARIANT 35: note = Any amino acid
  VARIANT 36: note = Any amino acid
  VARIANT 37: note = Any amino acid
  VARIANT 38: note = Any amino acid
  VARIANT 39: note = Any amino acid
  VARIANT 42: note = Any amino acid
  VARIANT 43: note = Any amino acid
  VARIANT 44: note = Any amino acid
  VARIANT 45: note = Any amino acid
  VARIANT 46: note = Any amino acid
  VARIANT 47: note = Any amino acid
  VARIANT 48: note = Any amino acid
  VARIANT 49: note = Any amino acid
  VARIANT 50: note = Any amino acid
  VARIANT 51: note = Any amino acid
  VARIANT 52: note = Any amino acid
GXXXXXXXXXXXXXXXXXXXXXXXXXXXXXXTXXXXXXXSGXXXXXXXXXXXK

SEQ ID NO: 797312 - protein, 53 aa, unidentified
  VARIANT 2: note = Any amino acid
  VARIANT 3: note = Any amino acid
  VARIANT 4: note = Any amino acid
  VARIANT 5: note = Any amino acid
  VARIANT 6: note = Any amino acid
  VARIANT 7: note = Any amino acid
  VARIANT 8: note = Any amino acid
  VARIANT 9: note = Any amino acid
  VARIANT 10: note = Any amino acid
  VARIANT 11: note = Any amino acid
  VARIANT 12: note = Any amino acid
  VARIANT 13: note = Any amino acid
  VARIANT 14: note = Any amino acid
  VARIANT 15: note = Any amino acid
  VARIANT 16: note = Any amino acid
  VARIANT 17: note = Any amino acid
  VARIANT 18: note = Any amino acid
  VARIANT 19: note = Any amino acid
  VARIANT 20: note = Any amino acid
  VARIANT 21: note = Any amino acid
  VARIANT 22: note = Any amino acid
  VARIANT 23: note = Any amino acid
  VARIANT 24: note = Any amino acid
  VARIANT 25: note = Any amino acid
  VARIANT 26: note = Any amino acid
  VARIANT 27: note = Any amino acid
  VARIANT 28: note = Any amino acid
  VARIANT 29: note = Any amino acid
  VARIANT 30: note = Any amino acid
  VARIANT 31: note = Any amino acid
  VARIANT 33: note = Any amino acid
  VARIANT 34: note = Any amino acid
  VARIANT 35: note = Any amino acid
  VARIANT 36: note = Any amino acid
  VARIANT 37: note = Any amino acid
  VARIANT 38: note = Any amino acid
  VARIANT 39: note = Any amino acid
  VARIANT 42: note = Any amino acid
  VARIANT 43: note = Any amino acid
  VARIANT 44: note = Any amino acid
  VARIANT 45: note = Any amino acid
  VARIANT 46: note = Any amino acid
  VARIANT 47: note = Any amino acid
  VARIANT 48: note = Any amino acid
  VARIANT 49: note = Any amino acid
  VARIANT 50: note = Any amino acid
  VARIANT 51: note = Any amino acid
  VARIANT 52: note = Any amino acid
GXXXXXXXXXXXXXXXXXXXXXXXXXXXXXXTXXXXXXXTGXXXXXXXXXXXA

SEQ ID NO: 797313 - protein, 53 aa, unidentified
  VARIANT 2: note = Any amino acid
  VARIANT 3: note = Any amino acid
  VARIANT 4: note = Any amino acid
  VARIANT 5: note = Any amino acid
  VARIANT 6: note = Any amino acid
  VARIANT 7: note = Any amino acid
  VARIANT 8: note = Any amino acid
  VARIANT 9: note = Any amino acid
  VARIANT 10: note = Any amino acid
  VARIANT 11: note = Any amino acid
  VARIANT 12: note = Any amino acid
  VARIANT 13: note = Any amino acid
  VARIANT 14: note = Any amino acid
  VARIANT 15: note = Any amino acid
  VARIANT 16: note = Any amino acid
  VARIANT 17: note = Any amino acid
  VARIANT 18: note = Any amino acid
  VARIANT 19: note = Any amino acid
  VARIANT 20: note = Any amino acid
  VARIANT 21: note = Any amino acid
  VARIANT 22: note = Any amino acid
  VARIANT 23: note = Any amino acid
  VARIANT 24: note = Any amino acid
  VARIANT 25: note = Any amino acid
  VARIANT 26: note = Any amino acid
  VARIANT 27: note = Any amino acid
  VARIANT 28: note = Any amino acid
  VARIANT 29: note = Any amino acid
  VARIANT 30: note = Any amino acid
  VARIANT 31: note = Any amino acid
  VARIANT 32: note = Any amino acid
  VARIANT 34: note = Any amino acid
  VARIANT 35: note = Any amino acid
  VARIANT 36: note = Any amino acid
  VARIANT 37: note = Any amino acid
  VARIANT 38: note = Any amino acid
  VARIANT 39: note = Any amino acid
  VARIANT 40: note = Any amino acid
  VARIANT 43: note = Any amino acid
  VARIANT 44: note = Any amino acid
  VARIANT 45: note = Any amino acid
  VARIANT 46: note = Any amino acid
  VARIANT 47: note = Any amino acid
  VARIANT 48: note = Any amino acid
  VARIANT 49: note = Any amino acid
  VARIANT 50: note = Any amino acid
  VARIANT 51: note = Any amino acid
  VARIANT 52: note = Any amino acid
GXXXXXXXXXXXXXXXXXXXXXXXXXXXXXXXRXXXXXXXTGXXXXXXXXXXG

SEQ ID NO: 797314 - protein, 51 aa, unidentified
  VARIANT 2: note = Any amino acid
  VARIANT 3: note = Any amino acid
  VARIANT 4: note = Any amino acid
  VARIANT 5: note = Any amino acid
  VARIANT 6: note = Any amino acid
  VARIANT 7: note = Any amino acid
  VARIANT 8: note = Any amino acid
  VARIANT 9: note = Any amino acid
  VARIANT 10: note = Any amino acid
  VARIANT 11: note = Any amino acid
  VARIANT 12: note = Any amino acid
  VARIANT 13: note = Any amino acid
  VARIANT 14: note = Any amino acid
  VARIANT 15: note = Any amino acid
  VARIANT 16: note = Any amino acid
  VARIANT 17: note = Any amino acid
  VARIANT 18: note = Any amino acid
  VARIANT 19: note = Any amino acid
  VARIANT 20: note = Any amino acid
  VARIANT 21: note = Any amino acid
  VARIANT 22: note = Any amino acid
  VARIANT 23: note = Any amino acid
  VARIANT 24: note = Any amino acid
  VARIANT 25: note = Any amino acid
  VARIANT 26: note = Any amino acid
  VARIANT 27: note = Any amino acid
  VARIANT 28: note = Any amino acid
  VARIANT 29: note = Any amino acid
  VARIANT 30: note = Any amino acid
  VARIANT 32: note = Any amino acid
  VARIANT 33: note = Any amino acid
  VARIANT 34: note = Any amino acid
  VARIANT 35: note = Any amino acid
  VARIANT 36: note = Any amino acid
  VARIANT 37: note = Any amino acid
  VARIANT 38: note = Any amino acid
  VARIANT 41: note = Any amino acid
  VARIANT 42: note = Any amino acid
  VARIANT 43: note = Any amino acid
  VARIANT 44: note = Any amino acid
  VARIANT 45: note = Any amino acid
  VARIANT 46: note = Any amino acid
  VARIANT 47: note = Any amino acid
  VARIANT 48: note = Any amino acid
  VARIANT 49: note = Any amino acid
  VARIANT 50: note = Any amino acid
SXXXXXXXXXXXXXXXXXXXXXXXXXXXXXGXXXXXXXSAXXXXXXXXXXG

SEQ ID NO: 797315 - protein, 51 aa, unidentified
  VARIANT 2: note = Any amino acid
  VARIANT 3: note = Any amino acid
  VARIANT 4: note = Any amino acid
  VARIANT 5: note = Any amino acid
  VARIANT 6: note = Any amino acid
  VARIANT 7: note = Any amino acid
  VARIANT 8: note = Any amino acid
  VARIANT 9: note = Any amino acid
  VARIANT 10: note = Any amino acid
  VARIANT 11: note = Any amino acid
  VARIANT 12: note = Any amino acid
  VARIANT 13: note = Any amino acid
  VARIANT 14: note = Any amino acid
  VARIANT 15: note = Any amino acid
  VARIANT 16: note = Any amino acid
  VARIANT 17: note = Any amino acid
  VARIANT 18: note = Any amino acid
  VARIANT 19: note = Any amino acid
  VARIANT 20: note = Any amino acid
  VARIANT 21: note = Any amino acid
  VARIANT 22: note = Any amino acid
  VARIANT 23: note = Any amino acid
  VARIANT 24: note = Any amino acid
  VARIANT 25: note = Any amino acid
  VARIANT 26: note = Any amino acid
  VARIANT 27: note = Any amino acid
  VARIANT 28: note = Any amino acid
  VARIANT 29: note = Any amino acid
  VARIANT 30: note = Any amino acid
  VARIANT 32: note = Any amino acid
  VARIANT 33: note = Any amino acid
  VARIANT 34: note = Any amino acid
  VARIANT 35: note = Any amino acid
  VARIANT 36: note = Any amino acid
  VARIANT 37: note = Any amino acid
  VARIANT 38: note = Any amino acid
  VARIANT 41: note = Any amino acid
  VARIANT 42: note = Any amino acid
  VARIANT 43: note = Any amino acid
  VARIANT 44: note = Any amino acid
  VARIANT 45: note = Any amino acid
  VARIANT 46: note = Any amino acid
  VARIANT 47: note = Any amino acid
  VARIANT 48: note = Any amino acid
  VARIANT 49: note = Any amino acid
  VARIANT 50: note = Any amino acid
GXXXXXXXXXXXXXXXXXXXXXXXXXXXXXAXXXXXXXSAXXXXXXXXXXG

SEQ ID NO: 797316 - protein, 56 aa, unidentified
  VARIANT 2: note = Any amino acid
  VARIANT 3: note = Any amino acid
  VARIANT 4: note = Any amino acid
  VARIANT 5: note = Any amino acid
  VARIANT 6: note = Any amino acid
  VARIANT 7: note = Any amino acid
  VARIANT 8: note = Any amino acid
  VARIANT 9: note = Any amino acid
  VARIANT 10: note = Any amino acid
  VARIANT 11: note = Any amino acid
  VARIANT 12: note = Any amino acid
  VARIANT 13: note = Any amino acid
  VARIANT 14: note = Any amino acid
  VARIANT 15: note = Any amino acid
  VARIANT 16: note = Any amino acid
  VARIANT 17: note = Any amino acid
  VARIANT 18: note = Any amino acid
  VARIANT 19: note = Any amino acid
  VARIANT 20: note = Any amino acid
  VARIANT 21: note = Any amino acid
  VARIANT 22: note = Any amino acid
  VARIANT 23: note = Any amino acid
  VARIANT 24: note = Any amino acid
  VARIANT 25: note = Any amino acid
  VARIANT 26: note = Any amino acid
  VARIANT 27: note = Any amino acid
  VARIANT 28: note = Any amino acid
  VARIANT 29: note = Any amino acid
  VARIANT 30: note = Any amino acid
  VARIANT 31: note = Any amino acid
  VARIANT 33: note = Any amino acid
  VARIANT 34: note = Any amino acid
  VARIANT 35: note = Any amino acid
  VARIANT 36: note = Any amino acid
  VARIANT 37: note = Any amino acid
  VARIANT 38: note = Any amino acid
  VARIANT 39: note = Any amino acid
  VARIANT 42: note = Any amino acid
  VARIANT 43: note = Any amino acid
  VARIANT 44: note = Any amino acid
  VARIANT 45: note = Any amino acid
  VARIANT 46: note = Any amino acid
  VARIANT 47: note = Any amino acid
  VARIANT 48: note = Any amino acid
  VARIANT 49: note = Any amino acid
  VARIANT 50: note = Any amino acid
  VARIANT 51: note = Any amino acid
  VARIANT 52: note = Any amino acid
  VARIANT 53: note = Any amino acid
  VARIANT 54: note = Any amino acid
  VARIANT 55: note = Any amino acid
GXXXXXXXXXXXXXXXXXXXXXXXXXXXXXXGXXXXXXXSGXXXXXXXXXXXXXXC

SEQ ID NO: 797317 - protein, 53 aa, unidentified
  VARIANT 2: note = Any amino acid
  VARIANT 3: note = Any amino acid
  VARIANT 4: note = Any amino acid
  VARIANT 5: note = Any amino acid
  VARIANT 6: note = Any amino acid
  VARIANT 7: note = Any amino acid
  VARIANT 8: note = Any amino acid
  VARIANT 9: note = Any amino acid
  VARIANT 10: note = Any amino acid
  VARIANT 11: note = Any amino acid
  VARIANT 12: note = Any amino acid
  VARIANT 13: note = Any amino acid
  VARIANT 14: note = Any amino acid
  VARIANT 15: note = Any amino acid
  VARIANT 16: note = Any amino acid
  VARIANT 17: note = Any amino acid
  VARIANT 18: note = Any amino acid
  VARIANT 19: note = Any amino acid
  VARIANT 20: note = Any amino acid
  VARIANT 21: note = Any amino acid
  VARIANT 22: note = Any amino acid
  VARIANT 23: note = Any amino acid
  VARIANT 24: note = Any amino acid
  VARIANT 25: note = Any amino acid
  VARIANT 26: note = Any amino acid
  VARIANT 27: note = Any amino acid
  VARIANT 28: note = Any amino acid
  VARIANT 29: note = Any amino acid
  VARIANT 30: note = Any amino acid
  VARIANT 31: note = Any amino acid
  VARIANT 33: note = Any amino acid
  VARIANT 34: note = Any amino acid
  VARIANT 35: note = Any amino acid
  VARIANT 36: note = Any amino acid
  VARIANT 37: note = Any amino acid
  VARIANT 38: note = Any amino acid
  VARIANT 39: note = Any amino acid
  VARIANT 42: note = Any amino acid
  VARIANT 43: note = Any amino acid
  VARIANT 44: note = Any amino acid
  VARIANT 45: note = Any amino acid
  VARIANT 46: note = Any amino acid
  VARIANT 47: note = Any amino acid
  VARIANT 48: note = Any amino acid
  VARIANT 49: note = Any amino acid
  VARIANT 50: note = Any amino acid
  VARIANT 51: note = Any amino acid
  VARIANT 52: note = Any amino acid
GXXXXXXXXXXXXXXXXXXXXXXXXXXXXXXGXXXXXXXTGXXXXXXXXXXXI

SEQ ID NO: 797318 - protein, 52 aa, unidentified
  VARIANT 2: note = Any amino acid
  VARIANT 3: note = Any amino acid
  VARIANT 4: note = Any amino acid
  VARIANT 5: note = Any amino acid
  VARIANT 6: note = Any amino acid
  VARIANT 7: note = Any amino acid
  VARIANT 8: note = Any amino acid
  VARIANT 9: note = Any amino acid
  VARIANT 10: note = Any amino acid
  VARIANT 11: note = Any amino acid
  VARIANT 12: note = Any amino acid
  VARIANT 13: note = Any amino acid
  VARIANT 14: note = Any amino acid
  VARIANT 15: note = Any amino acid
  VARIANT 16: note = Any amino acid
  VARIANT 17: note = Any amino acid
  VARIANT 18: note = Any amino acid
  VARIANT 19: note = Any amino acid
  VARIANT 20: note = Any amino acid
  VARIANT 21: note = Any amino acid
  VARIANT 22: note = Any amino acid
  VARIANT 23: note = Any amino acid
  VARIANT 24: note = Any amino acid
  VARIANT 25: note = Any amino acid
  VARIANT 26: note = Any amino acid
  VARIANT 27: note = Any amino acid
  VARIANT 28: note = Any amino acid
  VARIANT 29: note = Any amino acid
  VARIANT 30: note = Any amino acid
  VARIANT 31: note = Any amino acid
  VARIANT 33: note = Any amino acid
  VARIANT 34: note = Any amino acid
  VARIANT 35: note = Any amino acid
  VARIANT 36: note = Any amino acid
  VARIANT 37: note = Any amino acid
  VARIANT 38: note = Any amino acid
  VARIANT 39: note = Any amino acid
  VARIANT 42: note = Any amino acid
  VARIANT 43: note = Any amino acid
  VARIANT 44: note = Any amino acid
  VARIANT 45: note = Any amino acid
  VARIANT 46: note = Any amino acid
  VARIANT 47: note = Any amino acid
  VARIANT 48: note = Any amino acid
  VARIANT 49: note = Any amino acid
  VARIANT 50: note = Any amino acid
  VARIANT 51: note = Any amino acid
GXXXXXXXXXXXXXXXXXXXXXXXXXXXXXXHXXXXXXXSGXXXXXXXXXXG

SEQ ID NO: 797319 - protein, 52 aa, unidentified
  VARIANT 2: note = Any amino acid
  VARIANT 3: note = Any amino acid
  VARIANT 4: note = Any amino acid
  VARIANT 5: note = Any amino acid
  VARIANT 6: note = Any amino acid
  VARIANT 7: note = Any amino acid
  VARIANT 8: note = Any amino acid
  VARIANT 9: note = Any amino acid
  VARIANT 10: note = Any amino acid
  VARIANT 11: note = Any amino acid
  VARIANT 12: note = Any amino acid
  VARIANT 13: note = Any amino acid
  VARIANT 14: note = Any amino acid
  VARIANT 15: note = Any amino acid
  VARIANT 16: note = Any amino acid
  VARIANT 17: note = Any amino acid
  VARIANT 18: note = Any amino acid
  VARIANT 19: note = Any amino acid
  VARIANT 20: note = Any amino acid
  VARIANT 21: note = Any amino acid
  VARIANT 22: note = Any amino acid
  VARIANT 23: note = Any amino acid
  VARIANT 24: note = Any amino acid
  VARIANT 25: note = Any amino acid
  VARIANT 26: note = Any amino acid
  VARIANT 27: note = Any amino acid
  VARIANT 28: note = Any amino acid
  VARIANT 29: note = Any amino acid
  VARIANT 30: note = Any amino acid
  VARIANT 31: note = Any amino acid
  VARIANT 33: note = Any amino acid
  VARIANT 34: note = Any amino acid
  VARIANT 35: note = Any amino acid
  VARIANT 36: note = Any amino acid
  VARIANT 37: note = Any amino acid
  VARIANT 38: note = Any amino acid
  VARIANT 39: note = Any amino acid
  VARIANT 42: note = Any amino acid
  VARIANT 43: note = Any amino acid
  VARIANT 44: note = Any amino acid
  VARIANT 45: note = Any amino acid
  VARIANT 46: note = Any amino acid
  VARIANT 47: note = Any amino acid
  VARIANT 48: note = Any amino acid
  VARIANT 49: note = Any amino acid
  VARIANT 50: note = Any amino acid
  VARIANT 51: note = Any amino acid
GXXXXXXXXXXXXXXXXXXXXXXXXXXXXXXHXXXXXXXTGXXXXXXXXXXG

SEQ ID NO: 797320 - protein, 52 aa, unidentified
  VARIANT 2: note = Any amino acid
  VARIANT 3: note = Any amino acid
  VARIANT 4: note = Any amino acid
  VARIANT 5: note = Any amino acid
  VARIANT 6: note = Any amino acid
  VARIANT 7: note = Any amino acid
  VARIANT 8: note = Any amino acid
  VARIANT 9: note = Any amino acid
  VARIANT 10: note = Any amino acid
  VARIANT 11: note = Any amino acid
  VARIANT 12: note = Any amino acid
  VARIANT 13: note = Any amino acid
  VARIANT 14: note = Any amino acid
  VARIANT 15: note = Any amino acid
  VARIANT 16: note = Any amino acid
  VARIANT 17: note = Any amino acid
  VARIANT 18: note = Any amino acid
  VARIANT 19: note = Any amino acid
  VARIANT 20: note = Any amino acid
  VARIANT 21: note = Any amino acid
  VARIANT 22: note = Any amino acid
  VARIANT 23: note = Any amino acid
  VARIANT 24: note = Any amino acid
  VARIANT 25: note = Any amino acid
  VARIANT 26: note = Any amino acid
  VARIANT 27: note = Any amino acid
  VARIANT 28: note = Any amino acid
  VARIANT 29: note = Any amino acid
  VARIANT 30: note = Any amino acid
  VARIANT 31: note = Any amino acid
  VARIANT 33: note = Any amino acid
  VARIANT 34: note = Any amino acid
  VARIANT 35: note = Any amino acid
  VARIANT 36: note = Any amino acid
  VARIANT 37: note = Any amino acid
  VARIANT 38: note = Any amino acid
  VARIANT 39: note = Any amino acid
  VARIANT 42: note = Any amino acid
  VARIANT 43: note = Any amino acid
  VARIANT 44: note = Any amino acid
  VARIANT 45: note = Any amino acid
  VARIANT 46: note = Any amino acid
  VARIANT 47: note = Any amino acid
  VARIANT 48: note = Any amino acid
  VARIANT 49: note = Any amino acid
  VARIANT 50: note = Any amino acid
  VARIANT 51: note = Any amino acid
GXXXXXXXXXXXXXXXXXXXXXXXXXXXXXXNXXXXXXXSGXXXXXXXXXXG

SEQ ID NO: 797321 - protein, 52 aa, unidentified
  VARIANT 2: note = Any amino acid
  VARIANT 3: note = Any amino acid
  VARIANT 4: note = Any amino acid
  VARIANT 5: note = Any amino acid
  VARIANT 6: note = Any amino acid
  VARIANT 7: note = Any amino acid
  VARIANT 8: note = Any amino acid
  VARIANT 9: note = Any amino acid
  VARIANT 10: note = Any amino acid
  VARIANT 11: note = Any amino acid
  VARIANT 12: note = Any amino acid
  VARIANT 13: note = Any amino acid
  VARIANT 14: note = Any amino acid
  VARIANT 15: note = Any amino acid
  VARIANT 16: note = Any amino acid
  VARIANT 17: note = Any amino acid
  VARIANT 18: note = Any amino acid
  VARIANT 19: note = Any amino acid
  VARIANT 20: note = Any amino acid
  VARIANT 21: note = Any amino acid
  VARIANT 22: note = Any amino acid
  VARIANT 23: note = Any amino acid
  VARIANT 24: note = Any amino acid
  VARIANT 25: note = Any amino acid
  VARIANT 26: note = Any amino acid
  VARIANT 27: note = Any amino acid
  VARIANT 28: note = Any amino acid
  VARIANT 29: note = Any amino acid
  VARIANT 30: note = Any amino acid
  VARIANT 31: note = Any amino acid
  VARIANT 33: note = Any amino acid
  VARIANT 34: note = Any amino acid
  VARIANT 35: note = Any amino acid
  VARIANT 36: note = Any amino acid
  VARIANT 37: note = Any amino acid
  VARIANT 38: note = Any amino acid
  VARIANT 39: note = Any amino acid
  VARIANT 42: note = Any amino acid
  VARIANT 43: note = Any amino acid
  VARIANT 44: note = Any amino acid
  VARIANT 45: note = Any amino acid
  VARIANT 46: note = Any amino acid
  VARIANT 47: note = Any amino acid
  VARIANT 48: note = Any amino acid
  VARIANT 49: note = Any amino acid
  VARIANT 50: note = Any amino acid
  VARIANT 51: note = Any amino acid
GXXXXXXXXXXXXXXXXXXXXXXXXXXXXXXNXXXXXXXSGXXXXXXXXXXV

SEQ ID NO: 797322 - protein, 52 aa, unidentified
  VARIANT 2: note = Any amino acid
  VARIANT 3: note = Any amino acid
  VARIANT 4: note = Any amino acid
  VARIANT 5: note = Any amino acid
  VARIANT 6: note = Any amino acid
  VARIANT 7: note = Any amino acid
  VARIANT 8: note = Any amino acid
  VARIANT 9: note = Any amino acid
  VARIANT 10: note = Any amino acid
  VARIANT 11: note = Any amino acid
  VARIANT 12: note = Any amino acid
  VARIANT 13: note = Any amino acid
  VARIANT 14: note = Any amino acid
  VARIANT 15: note = Any amino acid
  VARIANT 16: note = Any amino acid
  VARIANT 17: note = Any amino acid
  VARIANT 18: note = Any amino acid
  VARIANT 19: note = Any amino acid
  VARIANT 20: note = Any amino acid
  VARIANT 21: note = Any amino acid
  VARIANT 22: note = Any amino acid
  VARIANT 23: note = Any amino acid
  VARIANT 24: note = Any amino acid
  VARIANT 25: note = Any amino acid
  VARIANT 26: note = Any amino acid
  VARIANT 27: note = Any amino acid
  VARIANT 28: note = Any amino acid
  VARIANT 29: note = Any amino acid
  VARIANT 30: note = Any amino acid
  VARIANT 31: note = Any amino acid
  VARIANT 33: note = Any amino acid
  VARIANT 34: note = Any amino acid
  VARIANT 35: note = Any amino acid
  VARIANT 36: note = Any amino acid
  VARIANT 37: note = Any amino acid
  VARIANT 38: note = Any amino acid
  VARIANT 39: note = Any amino acid
  VARIANT 42: note = Any amino acid
  VARIANT 43: note = Any amino acid
  VARIANT 44: note = Any amino acid
  VARIANT 45: note = Any amino acid
  VARIANT 46: note = Any amino acid
  VARIANT 47: note = Any amino acid
  VARIANT 48: note = Any amino acid
  VARIANT 49: note = Any amino acid
  VARIANT 50: note = Any amino acid
  VARIANT 51: note = Any amino acid
GXXXXXXXXXXXXXXXXXXXXXXXXXXXXXXNXXXXXXXTGXXXXXXXXXXT

SEQ ID NO: 797323 - protein, 52 aa, unidentified
  VARIANT 2: note = Any amino acid
  VARIANT 3: note = Any amino acid
  VARIANT 4: note = Any amino acid
  VARIANT 5: note = Any amino acid
  VARIANT 6: note = Any amino acid
  VARIANT 7: note = Any amino acid
  VARIANT 8: note = Any amino acid
  VARIANT 9: note = Any amino acid
  VARIANT 10: note = Any amino acid
  VARIANT 11: note = Any amino acid
  VARIANT 12: note = Any amino acid
  VARIANT 13: note = Any amino acid
  VARIANT 14: note = Any amino acid
  VARIANT 15: note = Any amino acid
  VARIANT 16: note = Any amino acid
  VARIANT 17: note = Any amino acid
  VARIANT 18: note = Any amino acid
  VARIANT 19: note = Any amino acid
  VARIANT 20: note = Any amino acid
  VARIANT 21: note = Any amino acid
  VARIANT 22: note = Any amino acid
  VARIANT 23: note = Any amino acid
  VARIANT 24: note = Any amino acid
  VARIANT 25: note = Any amino acid
  VARIANT 26: note = Any amino acid
  VARIANT 27: note = Any amino acid
  VARIANT 28: note = Any amino acid
  VARIANT 29: note = Any amino acid
  VARIANT 30: note = Any amino acid
  VARIANT 31: note = Any amino acid
  VARIANT 33: note = Any amino acid
  VARIANT 34: note = Any amino acid
  VARIANT 35: note = Any amino acid
  VARIANT 36: note = Any amino acid
  VARIANT 37: note = Any amino acid
  VARIANT 38: note = Any amino acid
  VARIANT 39: note = Any amino acid
  VARIANT 42: note = Any amino acid
  VARIANT 43: note = Any amino acid
  VARIANT 44: note = Any amino acid
  VARIANT 45: note = Any amino acid
  VARIANT 46: note = Any amino acid
  VARIANT 47: note = Any amino acid
  VARIANT 48: note = Any amino acid
  VARIANT 49: note = Any amino acid
  VARIANT 50: note = Any amino acid
  VARIANT 51: note = Any amino acid
GXXXXXXXXXXXXXXXXXXXXXXXXXXXXXXSXXXXXXXSGXXXXXXXXXXT

SEQ ID NO: 797324 - protein, 53 aa, unidentified
  VARIANT 2: note = Any amino acid
  VARIANT 3: note = Any amino acid
  VARIANT 4: note = Any amino acid
  VARIANT 5: note = Any amino acid
  VARIANT 6: note = Any amino acid
  VARIANT 7: note = Any amino acid
  VARIANT 8: note = Any amino acid
  VARIANT 9: note = Any amino acid
  VARIANT 10: note = Any amino acid
  VARIANT 11: note = Any amino acid
  VARIANT 12: note = Any amino acid
  VARIANT 13: note = Any amino acid
  VARIANT 14: note = Any amino acid
  VARIANT 15: note = Any amino acid
  VARIANT 16: note = Any amino acid
  VARIANT 17: note = Any amino acid
  VARIANT 18: note = Any amino acid
  VARIANT 19: note = Any amino acid
  VARIANT 20: note = Any amino acid
  VARIANT 21: note = Any amino acid
  VARIANT 22: note = Any amino acid
  VARIANT 23: note = Any amino acid
  VARIANT 24: note = Any amino acid
  VARIANT 25: note = Any amino acid
  VARIANT 26: note = Any amino acid
  VARIANT 27: note = Any amino acid
  VARIANT 28: note = Any amino acid
  VARIANT 29: note = Any amino acid
  VARIANT 30: note = Any amino acid
  VARIANT 31: note = Any amino acid
  VARIANT 32: note = Any amino acid
  VARIANT 34: note = Any amino acid
  VARIANT 35: note = Any amino acid
  VARIANT 36: note = Any amino acid
  VARIANT 37: note = Any amino acid
  VARIANT 38: note = Any amino acid
  VARIANT 39: note = Any amino acid
  VARIANT 40: note = Any amino acid
  VARIANT 43: note = Any amino acid
  VARIANT 44: note = Any amino acid
  VARIANT 45: note = Any amino acid
  VARIANT 46: note = Any amino acid
  VARIANT 47: note = Any amino acid
  VARIANT 48: note = Any amino acid
  VARIANT 49: note = Any amino acid
  VARIANT 50: note = Any amino acid
  VARIANT 51: note = Any amino acid
  VARIANT 52: note = Any amino acid
GXXXXXXXXXXXXXXXXXXXXXXXXXXXXXXXGXXXXXXXTGXXXXXXXXXXG

SEQ ID NO: 797325 - protein, 50 aa, unidentified
  VARIANT 2: note = Any amino acid
  VARIANT 3: note = Any amino acid
  VARIANT 4: note = Any amino acid
  VARIANT 5: note = Any amino acid
  VARIANT 6: note = Any amino acid
  VARIANT 7: note = Any amino acid
  VARIANT 8: note = Any amino acid
  VARIANT 9: note = Any amino acid
  VARIANT 10: note = Any amino acid
  VARIANT 11: note = Any amino acid
  VARIANT 12: note = Any amino acid
  VARIANT 13: note = Any amino acid
  VARIANT 14: note = Any amino acid
  VARIANT 15: note = Any amino acid
  VARIANT 16: note = Any amino acid
  VARIANT 17: note = Any amino acid
  VARIANT 18: note = Any amino acid
  VARIANT 19: note = Any amino acid
  VARIANT 20: note = Any amino acid
  VARIANT 21: note = Any amino acid
  VARIANT 22: note = Any amino acid
  VARIANT 23: note = Any amino acid
  VARIANT 24: note = Any amino acid
  VARIANT 25: note = Any amino acid
  VARIANT 26: note = Any amino acid
  VARIANT 27: note = Any amino acid
  VARIANT 28: note = Any amino acid
  VARIANT 29: note = Any amino acid
  VARIANT 31: note = Any amino acid
  VARIANT 32: note = Any amino acid
  VARIANT 33: note = Any amino acid
  VARIANT 34: note = Any amino acid
  VARIANT 35: note = Any amino acid
  VARIANT 36: note = Any amino acid
  VARIANT 37: note = Any amino acid
  VARIANT 40: note = Any amino acid
  VARIANT 41: note = Any amino acid
  VARIANT 42: note = Any amino acid
  VARIANT 43: note = Any amino acid
  VARIANT 44: note = Any amino acid
  VARIANT 45: note = Any amino acid
  VARIANT 46: note = Any amino acid
  VARIANT 47: note = Any amino acid
  VARIANT 48: note = Any amino acid
  VARIANT 49: note = Any amino acid
GXXXXXXXXXXXXXXXXXXXXXXXXXXXXGXXXXXXXSGXXXXXXXXXXR

SEQ ID NO: 797326 - protein, 54 aa, unidentified
  VARIANT 2: note = Any amino acid
  VARIANT 3: note = Any amino acid
  VARIANT 4: note = Any amino acid
  VARIANT 5: note = Any amino acid
  VARIANT 6: note = Any amino acid
  VARIANT 7: note = Any amino acid
  VARIANT 8: note = Any amino acid
  VARIANT 9: note = Any amino acid
  VARIANT 10: note = Any amino acid
  VARIANT 11: note = Any amino acid
  VARIANT 12: note = Any amino acid
  VARIANT 13: note = Any amino acid
  VARIANT 14: note = Any amino acid
  VARIANT 15: note = Any amino acid
  VARIANT 16: note = Any amino acid
  VARIANT 17: note = Any amino acid
  VARIANT 18: note = Any amino acid
  VARIANT 19: note = Any amino acid
  VARIANT 20: note = Any amino acid
  VARIANT 21: note = Any amino acid
  VARIANT 22: note = Any amino acid
  VARIANT 23: note = Any amino acid
  VARIANT 24: note = Any amino acid
  VARIANT 25: note = Any amino acid
  VARIANT 26: note = Any amino acid
  VARIANT 27: note = Any amino acid
  VARIANT 28: note = Any amino acid
  VARIANT 29: note = Any amino acid
  VARIANT 31: note = Any amino acid
  VARIANT 32: note = Any amino acid
  VARIANT 33: note = Any amino acid
  VARIANT 34: note = Any amino acid
  VARIANT 35: note = Any amino acid
  VARIANT 36: note = Any amino acid
  VARIANT 37: note = Any amino acid
  VARIANT 40: note = Any amino acid
  VARIANT 41: note = Any amino acid
  VARIANT 42: note = Any amino acid
  VARIANT 43: note = Any amino acid
  VARIANT 44: note = Any amino acid
  VARIANT 45: note = Any amino acid
  VARIANT 46: note = Any amino acid
  VARIANT 47: note = Any amino acid
  VARIANT 48: note = Any amino acid
  VARIANT 49: note = Any amino acid
  VARIANT 50: note = Any amino acid
  VARIANT 51: note = Any amino acid
  VARIANT 52: note = Any amino acid
  VARIANT 53: note = Any amino acid
GXXXXXXXXXXXXXXXXXXXXXXXXXXXXGXXXXXXXTAXXXXXXXXXXXXXXG

SEQ ID NO: 797327 - protein, 53 aa, unidentified
  VARIANT 2: note = Any amino acid
  VARIANT 3: note = Any amino acid
  VARIANT 4: note = Any amino acid
  VARIANT 5: note = Any amino acid
  VARIANT 6: note = Any amino acid
  VARIANT 7: note = Any amino acid
  VARIANT 8: note = Any amino acid
  VARIANT 9: note = Any amino acid
  VARIANT 10: note = Any amino acid
  VARIANT 11: note = Any amino acid
  VARIANT 12: note = Any amino acid
  VARIANT 13: note = Any amino acid
  VARIANT 14: note = Any amino acid
  VARIANT 15: note = Any amino acid
  VARIANT 16: note = Any amino acid
  VARIANT 17: note = Any amino acid
  VARIANT 18: note = Any amino acid
  VARIANT 19: note = Any amino acid
  VARIANT 20: note = Any amino acid
  VARIANT 21: note = Any amino acid
  VARIANT 22: note = Any amino acid
  VARIANT 23: note = Any amino acid
  VARIANT 24: note = Any amino acid
  VARIANT 25: note = Any amino acid
  VARIANT 26: note = Any amino acid
  VARIANT 27: note = Any amino acid
  VARIANT 28: note = Any amino acid
  VARIANT 29: note = Any amino acid
  VARIANT 30: note = Any amino acid
  VARIANT 32: note = Any amino acid
  VARIANT 33: note = Any amino acid
  VARIANT 34: note = Any amino acid
  VARIANT 35: note = Any amino acid
  VARIANT 36: note = Any amino acid
  VARIANT 37: note = Any amino acid
  VARIANT 38: note = Any amino acid
  VARIANT 41: note = Any amino acid
  VARIANT 42: note = Any amino acid
  VARIANT 43: note = Any amino acid
  VARIANT 44: note = Any amino acid
  VARIANT 45: note = Any amino acid
  VARIANT 46: note = Any amino acid
  VARIANT 47: note = Any amino acid
  VARIANT 48: note = Any amino acid
  VARIANT 49: note = Any amino acid
  VARIANT 50: note = Any amino acid
  VARIANT 51: note = Any amino acid
  VARIANT 52: note = Any amino acid
GXXXXXXXXXXXXXXXXXXXXXXXXXXXXXRXXXXXXXSGXXXXXXXXXXXXG

SEQ ID NO: 797328 - protein, 53 aa, unidentified
  VARIANT 2: note = Any amino acid
  VARIANT 3: note = Any amino acid
  VARIANT 4: note = Any amino acid
  VARIANT 5: note = Any amino acid
  VARIANT 6: note = Any amino acid
  VARIANT 7: note = Any amino acid
  VARIANT 8: note = Any amino acid
  VARIANT 9: note = Any amino acid
  VARIANT 10: note = Any amino acid
  VARIANT 11: note = Any amino acid
  VARIANT 12: note = Any amino acid
  VARIANT 13: note = Any amino acid
  VARIANT 14: note = Any amino acid
  VARIANT 15: note = Any amino acid
  VARIANT 16: note = Any amino acid
  VARIANT 17: note = Any amino acid
  VARIANT 18: note = Any amino acid
  VARIANT 19: note = Any amino acid
  VARIANT 20: note = Any amino acid
  VARIANT 21: note = Any amino acid
  VARIANT 22: note = Any amino acid
  VARIANT 23: note = Any amino acid
  VARIANT 24: note = Any amino acid
  VARIANT 25: note = Any amino acid
  VARIANT 26: note = Any amino acid
  VARIANT 27: note = Any amino acid
  VARIANT 28: note = Any amino acid
  VARIANT 29: note = Any amino acid
  VARIANT 30: note = Any amino acid
  VARIANT 31: note = Any amino acid
  VARIANT 33: note = Any amino acid
  VARIANT 34: note = Any amino acid
  VARIANT 35: note = Any amino acid
  VARIANT 36: note = Any amino acid
  VARIANT 37: note = Any amino acid
  VARIANT 38: note = Any amino acid
  VARIANT 39: note = Any amino acid
  VARIANT 42: note = Any amino acid
  VARIANT 43: note = Any amino acid
  VARIANT 44: note = Any amino acid
  VARIANT 45: note = Any amino acid
  VARIANT 46: note = Any amino acid
  VARIANT 47: note = Any amino acid
  VARIANT 48: note = Any amino acid
  VARIANT 49: note = Any amino acid
  VARIANT 50: note = Any amino acid
  VARIANT 51: note = Any amino acid
  VARIANT 52: note = Any amino acid
GXXXXXXXXXXXXXXXXXXXXXXXXXXXXXXCXXXXXXXSGXXXXXXXXXXXG

SEQ ID NO: 797329 - protein, 51 aa, unidentified
  VARIANT 2: note = Any amino acid
  VARIANT 3: note = Any amino acid
  VARIANT 4: note = Any amino acid
  VARIANT 5: note = Any amino acid
  VARIANT 6: note = Any amino acid
  VARIANT 7: note = Any amino acid
  VARIANT 8: note = Any amino acid
  VARIANT 9: note = Any amino acid
  VARIANT 10: note = Any amino acid
  VARIANT 11: note = Any amino acid
  VARIANT 12: note = Any amino acid
  VARIANT 13: note = Any amino acid
  VARIANT 14: note = Any amino acid
  VARIANT 15: note = Any amino acid
  VARIANT 16: note = Any amino acid
  VARIANT 17: note = Any amino acid
  VARIANT 18: note = Any amino acid
  VARIANT 19: note = Any amino acid
  VARIANT 20: note = Any amino acid
  VARIANT 21: note = Any amino acid
  VARIANT 22: note = Any amino acid
  VARIANT 23: note = Any amino acid
  VARIANT 24: note = Any amino acid
  VARIANT 25: note = Any amino acid
  VARIANT 26: note = Any amino acid
  VARIANT 27: note = Any amino acid
  VARIANT 28: note = Any amino acid
  VARIANT 29: note = Any amino acid
  VARIANT 30: note = Any amino acid
  VARIANT 31: note = Any amino acid
  VARIANT 33: note = Any amino acid
  VARIANT 34: note = Any amino acid
  VARIANT 35: note = Any amino acid
  VARIANT 36: note = Any amino acid
  VARIANT 37: note = Any amino acid
  VARIANT 38: note = Any amino acid
  VARIANT 39: note = Any amino acid
  VARIANT 42: note = Any amino acid
  VARIANT 43: note = Any amino acid
  VARIANT 44: note = Any amino acid
  VARIANT 45: note = Any amino acid
  VARIANT 46: note = Any amino acid
  VARIANT 47: note = Any amino acid
  VARIANT 48: note = Any amino acid
  VARIANT 49: note = Any amino acid
  VARIANT 50: note = Any amino acid
GXXXXXXXXXXXXXXXXXXXXXXXXXXXXXXGXXXXXXXSAXXXXXXXXXG

SEQ ID NO: 797330 - protein, 52 aa, unidentified
  VARIANT 2: note = Any amino acid
  VARIANT 3: note = Any amino acid
  VARIANT 4: note = Any amino acid
  VARIANT 5: note = Any amino acid
  VARIANT 6: note = Any amino acid
  VARIANT 7: note = Any amino acid
  VARIANT 8: note = Any amino acid
  VARIANT 9: note = Any amino acid
  VARIANT 10: note = Any amino acid
  VARIANT 11: note = Any amino acid
  VARIANT 12: note = Any amino acid
  VARIANT 13: note = Any amino acid
  VARIANT 14: note = Any amino acid
  VARIANT 15: note = Any amino acid
  VARIANT 16: note = Any amino acid
  VARIANT 17: note = Any amino acid
  VARIANT 18: note = Any amino acid
  VARIANT 19: note = Any amino acid
  VARIANT 20: note = Any amino acid
  VARIANT 21: note = Any amino acid
  VARIANT 22: note = Any amino acid
  VARIANT 23: note = Any amino acid
  VARIANT 24: note = Any amino acid
  VARIANT 25: note = Any amino acid
  VARIANT 26: note = Any amino acid
  VARIANT 27: note = Any amino acid
  VARIANT 28: note = Any amino acid
  VARIANT 29: note = Any amino acid
  VARIANT 30: note = Any amino acid
  VARIANT 31: note = Any amino acid
  VARIANT 33: note = Any amino acid
  VARIANT 34: note = Any amino acid
  VARIANT 35: note = Any amino acid
  VARIANT 36: note = Any amino acid
  VARIANT 37: note = Any amino acid
  VARIANT 38: note = Any amino acid
  VARIANT 39: note = Any amino acid
  VARIANT 42: note = Any amino acid
  VARIANT 43: note = Any amino acid
  VARIANT 44: note = Any amino acid
  VARIANT 45: note = Any amino acid
  VARIANT 46: note = Any amino acid
  VARIANT 47: note = Any amino acid
  VARIANT 48: note = Any amino acid
  VARIANT 49: note = Any amino acid
  VARIANT 50: note = Any amino acid
  VARIANT 51: note = Any amino acid
GXXXXXXXXXXXXXXXXXXXXXXXXXXXXXXGXXXXXXXSAXXXXXXXXXXN

SEQ ID NO: 797331 - protein, 52 aa, unidentified
  VARIANT 2: note = Any amino acid
  VARIANT 3: note = Any amino acid
  VARIANT 4: note = Any amino acid
  VARIANT 5: note = Any amino acid
  VARIANT 6: note = Any amino acid
  VARIANT 7: note = Any amino acid
  VARIANT 8: note = Any amino acid
  VARIANT 9: note = Any amino acid
  VARIANT 10: note = Any amino acid
  VARIANT 11: note = Any amino acid
  VARIANT 12: note = Any amino acid
  VARIANT 13: note = Any amino acid
  VARIANT 14: note = Any amino acid
  VARIANT 15: note = Any amino acid
  VARIANT 16: note = Any amino acid
  VARIANT 17: note = Any amino acid
  VARIANT 18: note = Any amino acid
  VARIANT 19: note = Any amino acid
  VARIANT 20: note = Any amino acid
  VARIANT 21: note = Any amino acid
  VARIANT 22: note = Any amino acid
  VARIANT 23: note = Any amino acid
  VARIANT 24: note = Any amino acid
  VARIANT 25: note = Any amino acid
  VARIANT 26: note = Any amino acid
  VARIANT 27: note = Any amino acid
  VARIANT 28: note = Any amino acid
  VARIANT 29: note = Any amino acid
  VARIANT 30: note = Any amino acid
  VARIANT 31: note = Any amino acid
  VARIANT 33: note = Any amino acid
  VARIANT 34: note = Any amino acid
  VARIANT 35: note = Any amino acid
  VARIANT 36: note = Any amino acid
  VARIANT 37: note = Any amino acid
  VARIANT 38: note = Any amino acid
  VARIANT 39: note = Any amino acid
  VARIANT 42: note = Any amino acid
  VARIANT 43: note = Any amino acid
  VARIANT 44: note = Any amino acid
  VARIANT 45: note = Any amino acid
  VARIANT 46: note = Any amino acid
  VARIANT 47: note = Any amino acid
  VARIANT 48: note = Any amino acid
  VARIANT 49: note = Any amino acid
  VARIANT 50: note = Any amino acid
  VARIANT 51: note = Any amino acid
GXXXXXXXXXXXXXXXXXXXXXXXXXXXXXXRXXXXXXXSGXXXXXXXXXXS

SEQ ID NO: 797332 - protein, 55 aa, unidentified
  VARIANT 2: note = Any amino acid
  VARIANT 3: note = Any amino acid
  VARIANT 4: note = Any amino acid
  VARIANT 5: note = Any amino acid
  VARIANT 6: note = Any amino acid
  VARIANT 7: note = Any amino acid
  VARIANT 8: note = Any amino acid
  VARIANT 9: note = Any amino acid
  VARIANT 10: note = Any amino acid
  VARIANT 11: note = Any amino acid
  VARIANT 12: note = Any amino acid
  VARIANT 13: note = Any amino acid
  VARIANT 14: note = Any amino acid
  VARIANT 15: note = Any amino acid
  VARIANT 16: note = Any amino acid
  VARIANT 17: note = Any amino acid
  VARIANT 18: note = Any amino acid
  VARIANT 19: note = Any amino acid
  VARIANT 20: note = Any amino acid
  VARIANT 21: note = Any amino acid
  VARIANT 22: note = Any amino acid
  VARIANT 23: note = Any amino acid
  VARIANT 24: note = Any amino acid
  VARIANT 25: note = Any amino acid
  VARIANT 26: note = Any amino acid
  VARIANT 27: note = Any amino acid
  VARIANT 28: note = Any amino acid
  VARIANT 29: note = Any amino acid
  VARIANT 30: note = Any amino acid
  VARIANT 31: note = Any amino acid
  VARIANT 32: note = Any amino acid
  VARIANT 33: note = Any amino acid
  VARIANT 34: note = Any amino acid
  VARIANT 36: note = Any amino acid
  VARIANT 37: note = Any amino acid
  VARIANT 38: note = Any amino acid
  VARIANT 39: note = Any amino acid
  VARIANT 40: note = Any amino acid
  VARIANT 41: note = Any amino acid
  VARIANT 42: note = Any amino acid
  VARIANT 45: note = Any amino acid
  VARIANT 46: note = Any amino acid
  VARIANT 47: note = Any amino acid
  VARIANT 48: note = Any amino acid
  VARIANT 49: note = Any amino acid
  VARIANT 50: note = Any amino acid
  VARIANT 51: note = Any amino acid
  VARIANT 52: note = Any amino acid
  VARIANT 53: note = Any amino acid
  VARIANT 54: note = Any amino acid
GXXXXXXXXXXXXXXXXXXXXXXXXXXXXXXXXXGXXXXXXXSAXXXXXXXXXXG

SEQ ID NO: 797333 - protein, 53 aa, unidentified
  VARIANT 2: note = Any amino acid
  VARIANT 3: note = Any amino acid
  VARIANT 4: note = Any amino acid
  VARIANT 5: note = Any amino acid
  VARIANT 6: note = Any amino acid
  VARIANT 7: note = Any amino acid
  VARIANT 8: note = Any amino acid
  VARIANT 9: note = Any amino acid
  VARIANT 10: note = Any amino acid
  VARIANT 11: note = Any amino acid
  VARIANT 12: note = Any amino acid
  VARIANT 13: note = Any amino acid
  VARIANT 14: note = Any amino acid
  VARIANT 15: note = Any amino acid
  VARIANT 16: note = Any amino acid
  VARIANT 17: note = Any amino acid
  VARIANT 18: note = Any amino acid
  VARIANT 19: note = Any amino acid
  VARIANT 20: note = Any amino acid
  VARIANT 21: note = Any amino acid
  VARIANT 22: note = Any amino acid
  VARIANT 23: note = Any amino acid
  VARIANT 24: note = Any amino acid
  VARIANT 25: note = Any amino acid
  VARIANT 26: note = Any amino acid
  VARIANT 27: note = Any amino acid
  VARIANT 28: note = Any amino acid
  VARIANT 29: note = Any amino acid
  VARIANT 30: note = Any amino acid
  VARIANT 32: note = Any amino acid
  VARIANT 33: note = Any amino acid
  VARIANT 34: note = Any amino acid
  VARIANT 35: note = Any amino acid
  VARIANT 36: note = Any amino acid
  VARIANT 37: note = Any amino acid
  VARIANT 38: note = Any amino acid
  VARIANT 41: note = Any amino acid
  VARIANT 42: note = Any amino acid
  VARIANT 43: note = Any amino acid
  VARIANT 44: note = Any amino acid
  VARIANT 45: note = Any amino acid
  VARIANT 46: note = Any amino acid
  VARIANT 47: note = Any amino acid
  VARIANT 48: note = Any amino acid
  VARIANT 49: note = Any amino acid
  VARIANT 50: note = Any amino acid
  VARIANT 51: note = Any amino acid
  VARIANT 52: note = Any amino acid
NXXXXXXXXXXXXXXXXXXXXXXXXXXXXXGXXXXXXXSGXXXXXXXXXXXXA

SEQ ID NO: 797334 - protein, 51 aa, unidentified
  VARIANT 2: note = Any amino acid
  VARIANT 3: note = Any amino acid
  VARIANT 4: note = Any amino acid
  VARIANT 5: note = Any amino acid
  VARIANT 6: note = Any amino acid
  VARIANT 7: note = Any amino acid
  VARIANT 8: note = Any amino acid
  VARIANT 9: note = Any amino acid
  VARIANT 10: note = Any amino acid
  VARIANT 11: note = Any amino acid
  VARIANT 12: note = Any amino acid
  VARIANT 13: note = Any amino acid
  VARIANT 14: note = Any amino acid
  VARIANT 15: note = Any amino acid
  VARIANT 16: note = Any amino acid
  VARIANT 17: note = Any amino acid
  VARIANT 18: note = Any amino acid
  VARIANT 19: note = Any amino acid
  VARIANT 20: note = Any amino acid
  VARIANT 21: note = Any amino acid
  VARIANT 22: note = Any amino acid
  VARIANT 23: note = Any amino acid
  VARIANT 24: note = Any amino acid
  VARIANT 25: note = Any amino acid
  VARIANT 26: note = Any amino acid
  VARIANT 27: note = Any amino acid
  VARIANT 28: note = Any amino acid
  VARIANT 29: note = Any amino acid
  VARIANT 30: note = Any amino acid
  VARIANT 32: note = Any amino acid
  VARIANT 33: note = Any amino acid
  VARIANT 34: note = Any amino acid
  VARIANT 35: note = Any amino acid
  VARIANT 36: note = Any amino acid
  VARIANT 37: note = Any amino acid
  VARIANT 38: note = Any amino acid
  VARIANT 41: note = Any amino acid
  VARIANT 42: note = Any amino acid
  VARIANT 43: note = Any amino acid
  VARIANT 44: note = Any amino acid
  VARIANT 45: note = Any amino acid
  VARIANT 46: note = Any amino acid
  VARIANT 47: note = Any amino acid
  VARIANT 48: note = Any amino acid
  VARIANT 49: note = Any amino acid
  VARIANT 50: note = Any amino acid
AXXXXXXXXXXXXXXXXXXXXXXXXXXXXXGXXXXXXXSAXXXXXXXXXXG

SEQ ID NO: 797335 - protein, 52 aa, unidentified
  VARIANT 2: note = Any amino acid
  VARIANT 3: note = Any amino acid
  VARIANT 4: note = Any amino acid
  VARIANT 5: note = Any amino acid
  VARIANT 6: note = Any amino acid
  VARIANT 7: note = Any amino acid
  VARIANT 8: note = Any amino acid
  VARIANT 9: note = Any amino acid
  VARIANT 10: note = Any amino acid
  VARIANT 11: note = Any amino acid
  VARIANT 12: note = Any amino acid
  VARIANT 13: note = Any amino acid
  VARIANT 14: note = Any amino acid
  VARIANT 15: note = Any amino acid
  VARIANT 16: note = Any amino acid
  VARIANT 17: note = Any amino acid
  VARIANT 18: note = Any amino acid
  VARIANT 19: note = Any amino acid
  VARIANT 20: note = Any amino acid
  VARIANT 21: note = Any amino acid
  VARIANT 22: note = Any amino acid
  VARIANT 23: note = Any amino acid
  VARIANT 24: note = Any amino acid
  VARIANT 25: note = Any amino acid
  VARIANT 26: note = Any amino acid
  VARIANT 27: note = Any amino acid
  VARIANT 28: note = Any amino acid
  VARIANT 29: note = Any amino acid
  VARIANT 30: note = Any amino acid
  VARIANT 32: note = Any amino acid
  VARIANT 33: note = Any amino acid
  VARIANT 34: note = Any amino acid
  VARIANT 35: note = Any amino acid
  VARIANT 36: note = Any amino acid
  VARIANT 37: note = Any amino acid
  VARIANT 38: note = Any amino acid
  VARIANT 41: note = Any amino acid
  VARIANT 42: note = Any amino acid
  VARIANT 43: note = Any amino acid
  VARIANT 44: note = Any amino acid
  VARIANT 45: note = Any amino acid
  VARIANT 46: note = Any amino acid
  VARIANT 47: note = Any amino acid
  VARIANT 48: note = Any amino acid
  VARIANT 49: note = Any amino acid
  VARIANT 50: note = Any amino acid
  VARIANT 51: note = Any amino acid
DXXXXXXXXXXXXXXXXXXXXXXXXXXXXXGXXXXXXXSGXXXXXXXXXXXG

SEQ ID NO: 797336 - protein, 52 aa, unidentified
  VARIANT 2: note = Any amino acid
  VARIANT 3: note = Any amino acid
  VARIANT 4: note = Any amino acid
  VARIANT 5: note = Any amino acid
  VARIANT 6: note = Any amino acid
  VARIANT 7: note = Any amino acid
  VARIANT 8: note = Any amino acid
  VARIANT 9: note = Any amino acid
  VARIANT 10: note = Any amino acid
  VARIANT 11: note = Any amino acid
  VARIANT 12: note = Any amino acid
  VARIANT 13: note = Any amino acid
  VARIANT 14: note = Any amino acid
  VARIANT 15: note = Any amino acid
  VARIANT 16: note = Any amino acid
  VARIANT 17: note = Any amino acid
  VARIANT 18: note = Any amino acid
  VARIANT 19: note = Any amino acid
  VARIANT 20: note = Any amino acid
  VARIANT 21: note = Any amino acid
  VARIANT 22: note = Any amino acid
  VARIANT 23: note = Any amino acid
  VARIANT 24: note = Any amino acid
  VARIANT 25: note = Any amino acid
  VARIANT 26: note = Any amino acid
  VARIANT 27: note = Any amino acid
  VARIANT 28: note = Any amino acid
  VARIANT 29: note = Any amino acid
  VARIANT 30: note = Any amino acid
  VARIANT 32: note = Any amino acid
  VARIANT 33: note = Any amino acid
  VARIANT 34: note = Any amino acid
  VARIANT 35: note = Any amino acid
  VARIANT 36: note = Any amino acid
  VARIANT 37: note = Any amino acid
  VARIANT 38: note = Any amino acid
  VARIANT 41: note = Any amino acid
  VARIANT 42: note = Any amino acid
  VARIANT 43: note = Any amino acid
  VARIANT 44: note = Any amino acid
  VARIANT 45: note = Any amino acid
  VARIANT 46: note = Any amino acid
  VARIANT 47: note = Any amino acid
  VARIANT 48: note = Any amino acid
  VARIANT 49: note = Any amino acid
  VARIANT 50: note = Any amino acid
  VARIANT 51: note = Any amino acid
GXXXXXXXXXXXXXXXXXXXXXXXXXXXXXAXXXXXXXSGXXXXXXXXXXXG

SEQ ID NO: 797337 - protein, 52 aa, unidentified
  VARIANT 2: note = Any amino acid
  VARIANT 3: note = Any amino acid
  VARIANT 4: note = Any amino acid
  VARIANT 5: note = Any amino acid
  VARIANT 6: note = Any amino acid
  VARIANT 7: note = Any amino acid
  VARIANT 8: note = Any amino acid
  VARIANT 9: note = Any amino acid
  VARIANT 10: note = Any amino acid
  VARIANT 11: note = Any amino acid
  VARIANT 12: note = Any amino acid
  VARIANT 13: note = Any amino acid
  VARIANT 14: note = Any amino acid
  VARIANT 15: note = Any amino acid
  VARIANT 16: note = Any amino acid
  VARIANT 17: note = Any amino acid
  VARIANT 18: note = Any amino acid
  VARIANT 19: note = Any amino acid
  VARIANT 20: note = Any amino acid
  VARIANT 21: note = Any amino acid
  VARIANT 22: note = Any amino acid
  VARIANT 23: note = Any amino acid
  VARIANT 24: note = Any amino acid
  VARIANT 25: note = Any amino acid
  VARIANT 26: note = Any amino acid
  VARIANT 27: note = Any amino acid
  VARIANT 28: note = Any amino acid
  VARIANT 29: note = Any amino acid
  VARIANT 30: note = Any amino acid
  VARIANT 32: note = Any amino acid
  VARIANT 33: note = Any amino acid
  VARIANT 34: note = Any amino acid
  VARIANT 35: note = Any amino acid
  VARIANT 36: note = Any amino acid
  VARIANT 37: note = Any amino acid
  VARIANT 38: note = Any amino acid
  VARIANT 41: note = Any amino acid
  VARIANT 42: note = Any amino acid
  VARIANT 43: note = Any amino acid
  VARIANT 44: note = Any amino acid
  VARIANT 45: note = Any amino acid
  VARIANT 46: note = Any amino acid
  VARIANT 47: note = Any amino acid
  VARIANT 48: note = Any amino acid
  VARIANT 49: note = Any amino acid
  VARIANT 50: note = Any amino acid
  VARIANT 51: note = Any amino acid
GXXXXXXXXXXXXXXXXXXXXXXXXXXXXXAXXXXXXXTGXXXXXXXXXXXG

SEQ ID NO: 797338 - protein, 54 aa, unidentified
  VARIANT 2: note = Any amino acid
  VARIANT 3: note = Any amino acid
  VARIANT 4: note = Any amino acid
  VARIANT 5: note = Any amino acid
  VARIANT 6: note = Any amino acid
  VARIANT 7: note = Any amino acid
  VARIANT 8: note = Any amino acid
  VARIANT 9: note = Any amino acid
  VARIANT 10: note = Any amino acid
  VARIANT 11: note = Any amino acid
  VARIANT 12: note = Any amino acid
  VARIANT 13: note = Any amino acid
  VARIANT 14: note = Any amino acid
  VARIANT 15: note = Any amino acid
  VARIANT 16: note = Any amino acid
  VARIANT 17: note = Any amino acid
  VARIANT 18: note = Any amino acid
  VARIANT 19: note = Any amino acid
  VARIANT 20: note = Any amino acid
  VARIANT 21: note = Any amino acid
  VARIANT 22: note = Any amino acid
  VARIANT 23: note = Any amino acid
  VARIANT 24: note = Any amino acid
  VARIANT 25: note = Any amino acid
  VARIANT 26: note = Any amino acid
  VARIANT 27: note = Any amino acid
  VARIANT 28: note = Any amino acid
  VARIANT 29: note = Any amino acid
  VARIANT 30: note = Any amino acid
  VARIANT 32: note = Any amino acid
  VARIANT 33: note = Any amino acid
  VARIANT 34: note = Any amino acid
  VARIANT 35: note = Any amino acid
  VARIANT 36: note = Any amino acid
  VARIANT 37: note = Any amino acid
  VARIANT 38: note = Any amino acid
  VARIANT 41: note = Any amino acid
  VARIANT 42: note = Any amino acid
  VARIANT 43: note = Any amino acid
  VARIANT 44: note = Any amino acid
  VARIANT 45: note = Any amino acid
  VARIANT 46: note = Any amino acid
  VARIANT 47: note = Any amino acid
  VARIANT 48: note = Any amino acid
  VARIANT 49: note = Any amino acid
  VARIANT 50: note = Any amino acid
  VARIANT 51: note = Any amino acid
  VARIANT 52: note = Any amino acid
  VARIANT 53: note = Any amino acid
GXXXXXXXXXXXXXXXXXXXXXXXXXXXXXGXXXXXXXTGXXXXXXXXXXXXXG

SEQ ID NO: 797339 - protein, 53 aa, unidentified
  VARIANT 2: note = Any amino acid
  VARIANT 3: note = Any amino acid
  VARIANT 4: note = Any amino acid
  VARIANT 5: note = Any amino acid
  VARIANT 6: note = Any amino acid
  VARIANT 7: note = Any amino acid
  VARIANT 8: note = Any amino acid
  VARIANT 9: note = Any amino acid
  VARIANT 10: note = Any amino acid
  VARIANT 11: note = Any amino acid
  VARIANT 12: note = Any amino acid
  VARIANT 13: note = Any amino acid
  VARIANT 14: note = Any amino acid
  VARIANT 15: note = Any amino acid
  VARIANT 16: note = Any amino acid
  VARIANT 17: note = Any amino acid
  VARIANT 18: note = Any amino acid
  VARIANT 19: note = Any amino acid
  VARIANT 20: note = Any amino acid
  VARIANT 21: note = Any amino acid
  VARIANT 22: note = Any amino acid
  VARIANT 23: note = Any amino acid
  VARIANT 24: note = Any amino acid
  VARIANT 25: note = Any amino acid
  VARIANT 26: note = Any amino acid
  VARIANT 27: note = Any amino acid
  VARIANT 28: note = Any amino acid
  VARIANT 29: note = Any amino acid
  VARIANT 30: note = Any amino acid
  VARIANT 31: note = Any amino acid
  VARIANT 33: note = Any amino acid
  VARIANT 34: note = Any amino acid
  VARIANT 35: note = Any amino acid
  VARIANT 36: note = Any amino acid
  VARIANT 37: note = Any amino acid
  VARIANT 38: note = Any amino acid
  VARIANT 39: note = Any amino acid
  VARIANT 42: note = Any amino acid
  VARIANT 43: note = Any amino acid
  VARIANT 44: note = Any amino acid
  VARIANT 45: note = Any amino acid
  VARIANT 46: note = Any amino acid
  VARIANT 47: note = Any amino acid
  VARIANT 48: note = Any amino acid
  VARIANT 49: note = Any amino acid
  VARIANT 50: note = Any amino acid
  VARIANT 51: note = Any amino acid
  VARIANT 52: note = Any amino acid
GXXXXXXXXXXXXXXXXXXXXXXXXXXXXXXAXXXXXXXSGXXXXXXXXXXXA

SEQ ID NO: 797340 - protein, 52 aa, unidentified
  VARIANT 2: note = Any amino acid
  VARIANT 3: note = Any amino acid
  VARIANT 4: note = Any amino acid
  VARIANT 5: note = Any amino acid
  VARIANT 6: note = Any amino acid
  VARIANT 7: note = Any amino acid
  VARIANT 8: note = Any amino acid
  VARIANT 9: note = Any amino acid
  VARIANT 10: note = Any amino acid
  VARIANT 11: note = Any amino acid
  VARIANT 12: note = Any amino acid
  VARIANT 13: note = Any amino acid
  VARIANT 14: note = Any amino acid
  VARIANT 15: note = Any amino acid
  VARIANT 16: note = Any amino acid
  VARIANT 17: note = Any amino acid
  VARIANT 18: note = Any amino acid
  VARIANT 19: note = Any amino acid
  VARIANT 20: note = Any amino acid
  VARIANT 21: note = Any amino acid
  VARIANT 22: note = Any amino acid
  VARIANT 23: note = Any amino acid
  VARIANT 24: note = Any amino acid
  VARIANT 25: note = Any amino acid
  VARIANT 26: note = Any amino acid
  VARIANT 27: note = Any amino acid
  VARIANT 28: note = Any amino acid
  VARIANT 29: note = Any amino acid
  VARIANT 30: note = Any amino acid
  VARIANT 31: note = Any amino acid
  VARIANT 33: note = Any amino acid
  VARIANT 34: note = Any amino acid
  VARIANT 35: note = Any amino acid
  VARIANT 36: note = Any amino acid
  VARIANT 37: note = Any amino acid
  VARIANT 38: note = Any amino acid
  VARIANT 39: note = Any amino acid
  VARIANT 42: note = Any amino acid
  VARIANT 43: note = Any amino acid
  VARIANT 44: note = Any amino acid
  VARIANT 45: note = Any amino acid
  VARIANT 46: note = Any amino acid
  VARIANT 47: note = Any amino acid
  VARIANT 48: note = Any amino acid
  VARIANT 49: note = Any amino acid
  VARIANT 50: note = Any amino acid
  VARIANT 51: note = Any amino acid
GXXXXXXXXXXXXXXXXXXXXXXXXXXXXXXNXXXXXXXSGXXXXXXXXXXK

SEQ ID NO: 797341 - protein, 52 aa, unidentified
  VARIANT 2: note = Any amino acid
  VARIANT 3: note = Any amino acid
  VARIANT 4: note = Any amino acid
  VARIANT 5: note = Any amino acid
  VARIANT 6: note = Any amino acid
  VARIANT 7: note = Any amino acid
  VARIANT 8: note = Any amino acid
  VARIANT 9: note = Any amino acid
  VARIANT 10: note = Any amino acid
  VARIANT 11: note = Any amino acid
  VARIANT 12: note = Any amino acid
  VARIANT 13: note = Any amino acid
  VARIANT 14: note = Any amino acid
  VARIANT 15: note = Any amino acid
  VARIANT 16: note = Any amino acid
  VARIANT 17: note = Any amino acid
  VARIANT 18: note = Any amino acid
  VARIANT 19: note = Any amino acid
  VARIANT 20: note = Any amino acid
  VARIANT 21: note = Any amino acid
  VARIANT 22: note = Any amino acid
  VARIANT 23: note = Any amino acid
  VARIANT 24: note = Any amino acid
  VARIANT 25: note = Any amino acid
  VARIANT 26: note = Any amino acid
  VARIANT 27: note = Any amino acid
  VARIANT 28: note = Any amino acid
  VARIANT 29: note = Any amino acid
  VARIANT 30: note = Any amino acid
  VARIANT 31: note = Any amino acid
  VARIANT 33: note = Any amino acid
  VARIANT 34: note = Any amino acid
  VARIANT 35: note = Any amino acid
  VARIANT 36: note = Any amino acid
  VARIANT 37: note = Any amino acid
  VARIANT 38: note = Any amino acid
  VARIANT 39: note = Any amino acid
  VARIANT 42: note = Any amino acid
  VARIANT 43: note = Any amino acid
  VARIANT 44: note = Any amino acid
  VARIANT 45: note = Any amino acid
  VARIANT 46: note = Any amino acid
  VARIANT 47: note = Any amino acid
  VARIANT 48: note = Any amino acid
  VARIANT 49: note = Any amino acid
  VARIANT 50: note = Any amino acid
  VARIANT 51: note = Any amino acid
GXXXXXXXXXXXXXXXXXXXXXXXXXXXXXXRXXXXXXXSAXXXXXXXXXXA

SEQ ID NO: 797342 - protein, 52 aa, unidentified
  VARIANT 2: note = Any amino acid
  VARIANT 3: note = Any amino acid
  VARIANT 4: note = Any amino acid
  VARIANT 5: note = Any amino acid
  VARIANT 6: note = Any amino acid
  VARIANT 7: note = Any amino acid
  VARIANT 8: note = Any amino acid
  VARIANT 9: note = Any amino acid
  VARIANT 10: note = Any amino acid
  VARIANT 11: note = Any amino acid
  VARIANT 12: note = Any amino acid
  VARIANT 13: note = Any amino acid
  VARIANT 14: note = Any amino acid
  VARIANT 15: note = Any amino acid
  VARIANT 16: note = Any amino acid
  VARIANT 17: note = Any amino acid
  VARIANT 18: note = Any amino acid
  VARIANT 19: note = Any amino acid
  VARIANT 20: note = Any amino acid
  VARIANT 21: note = Any amino acid
  VARIANT 22: note = Any amino acid
  VARIANT 23: note = Any amino acid
  VARIANT 24: note = Any amino acid
  VARIANT 25: note = Any amino acid
  VARIANT 26: note = Any amino acid
  VARIANT 27: note = Any amino acid
  VARIANT 28: note = Any amino acid
  VARIANT 29: note = Any amino acid
  VARIANT 30: note = Any amino acid
  VARIANT 32: note = Any amino acid
  VARIANT 33: note = Any amino acid
  VARIANT 34: note = Any amino acid
  VARIANT 35: note = Any amino acid
  VARIANT 36: note = Any amino acid
  VARIANT 37: note = Any amino acid
  VARIANT 38: note = Any amino acid
  VARIANT 41: note = Any amino acid
  VARIANT 42: note = Any amino acid
  VARIANT 43: note = Any amino acid
  VARIANT 44: note = Any amino acid
  VARIANT 45: note = Any amino acid
  VARIANT 46: note = Any amino acid
  VARIANT 47: note = Any amino acid
  VARIANT 48: note = Any amino acid
  VARIANT 49: note = Any amino acid
  VARIANT 50: note = Any amino acid
  VARIANT 51: note = Any amino acid
KXXXXXXXXXXXXXXXXXXXXXXXXXXXXXGXXXXXXXSGXXXXXXXXXXXG

SEQ ID NO: 797343 - protein, 52 aa, unidentified
  VARIANT 2: note = Any amino acid
  VARIANT 3: note = Any amino acid
  VARIANT 4: note = Any amino acid
  VARIANT 5: note = Any amino acid
  VARIANT 6: note = Any amino acid
  VARIANT 7: note = Any amino acid
  VARIANT 8: note = Any amino acid
  VARIANT 9: note = Any amino acid
  VARIANT 10: note = Any amino acid
  VARIANT 11: note = Any amino acid
  VARIANT 12: note = Any amino acid
  VARIANT 13: note = Any amino acid
  VARIANT 14: note = Any amino acid
  VARIANT 15: note = Any amino acid
  VARIANT 16: note = Any amino acid
  VARIANT 17: note = Any amino acid
  VARIANT 18: note = Any amino acid
  VARIANT 19: note = Any amino acid
  VARIANT 20: note = Any amino acid
  VARIANT 21: note = Any amino acid
  VARIANT 22: note = Any amino acid
  VARIANT 23: note = Any amino acid
  VARIANT 24: note = Any amino acid
  VARIANT 25: note = Any amino acid
  VARIANT 26: note = Any amino acid
  VARIANT 27: note = Any amino acid
  VARIANT 28: note = Any amino acid
  VARIANT 29: note = Any amino acid
  VARIANT 30: note = Any amino acid
  VARIANT 32: note = Any amino acid
  VARIANT 33: note = Any amino acid
  VARIANT 34: note = Any amino acid
  VARIANT 35: note = Any amino acid
  VARIANT 36: note = Any amino acid
  VARIANT 37: note = Any amino acid
  VARIANT 38: note = Any amino acid
  VARIANT 41: note = Any amino acid
  VARIANT 42: note = Any amino acid
  VARIANT 43: note = Any amino acid
  VARIANT 44: note = Any amino acid
  VARIANT 45: note = Any amino acid
  VARIANT 46: note = Any amino acid
  VARIANT 47: note = Any amino acid
  VARIANT 48: note = Any amino acid
  VARIANT 49: note = Any amino acid
  VARIANT 50: note = Any amino acid
  VARIANT 51: note = Any amino acid
AXXXXXXXXXXXXXXXXXXXXXXXXXXXXXGXXXXXXXSGXXXXXXXXXXXA

SEQ ID NO: 797344 - protein, 51 aa, unidentified
  VARIANT 2: note = Any amino acid
  VARIANT 3: note = Any amino acid
  VARIANT 4: note = Any amino acid
  VARIANT 5: note = Any amino acid
  VARIANT 6: note = Any amino acid
  VARIANT 7: note = Any amino acid
  VARIANT 8: note = Any amino acid
  VARIANT 9: note = Any amino acid
  VARIANT 10: note = Any amino acid
  VARIANT 11: note = Any amino acid
  VARIANT 12: note = Any amino acid
  VARIANT 13: note = Any amino acid
  VARIANT 14: note = Any amino acid
  VARIANT 15: note = Any amino acid
  VARIANT 16: note = Any amino acid
  VARIANT 17: note = Any amino acid
  VARIANT 18: note = Any amino acid
  VARIANT 19: note = Any amino acid
  VARIANT 20: note = Any amino acid
  VARIANT 21: note = Any amino acid
  VARIANT 22: note = Any amino acid
  VARIANT 23: note = Any amino acid
  VARIANT 24: note = Any amino acid
  VARIANT 25: note = Any amino acid
  VARIANT 26: note = Any amino acid
  VARIANT 27: note = Any amino acid
  VARIANT 28: note = Any amino acid
  VARIANT 29: note = Any amino acid
  VARIANT 31: note = Any amino acid
  VARIANT 32: note = Any amino acid
  VARIANT 33: note = Any amino acid
  VARIANT 34: note = Any amino acid
  VARIANT 35: note = Any amino acid
  VARIANT 36: note = Any amino acid
  VARIANT 37: note = Any amino acid
  VARIANT 40: note = Any amino acid
  VARIANT 41: note = Any amino acid
  VARIANT 42: note = Any amino acid
  VARIANT 43: note = Any amino acid
  VARIANT 44: note = Any amino acid
  VARIANT 45: note = Any amino acid
  VARIANT 46: note = Any amino acid
  VARIANT 47: note = Any amino acid
  VARIANT 48: note = Any amino acid
  VARIANT 49: note = Any amino acid
  VARIANT 50: note = Any amino acid
GXXXXXXXXXXXXXXXXXXXXXXXXXXXXGXXXXXXXSGXXXXXXXXXXXS

SEQ ID NO: 797345 - protein, 55 aa, unidentified
  VARIANT 2: note = Any amino acid
  VARIANT 3: note = Any amino acid
  VARIANT 4: note = Any amino acid
  VARIANT 5: note = Any amino acid
  VARIANT 6: note = Any amino acid
  VARIANT 7: note = Any amino acid
  VARIANT 8: note = Any amino acid
  VARIANT 9: note = Any amino acid
  VARIANT 10: note = Any amino acid
  VARIANT 11: note = Any amino acid
  VARIANT 12: note = Any amino acid
  VARIANT 13: note = Any amino acid
  VARIANT 14: note = Any amino acid
  VARIANT 15: note = Any amino acid
  VARIANT 16: note = Any amino acid
  VARIANT 17: note = Any amino acid
  VARIANT 18: note = Any amino acid
  VARIANT 19: note = Any amino acid
  VARIANT 20: note = Any amino acid
  VARIANT 21: note = Any amino acid
  VARIANT 22: note = Any amino acid
  VARIANT 23: note = Any amino acid
  VARIANT 24: note = Any amino acid
  VARIANT 25: note = Any amino acid
  VARIANT 26: note = Any amino acid
  VARIANT 27: note = Any amino acid
  VARIANT 28: note = Any amino acid
  VARIANT 29: note = Any amino acid
  VARIANT 30: note = Any amino acid
  VARIANT 32: note = Any amino acid
  VARIANT 33: note = Any amino acid
  VARIANT 34: note = Any amino acid
  VARIANT 35: note = Any amino acid
  VARIANT 36: note = Any amino acid
  VARIANT 37: note = Any amino acid
  VARIANT 38: note = Any amino acid
  VARIANT 41: note = Any amino acid
  VARIANT 42: note = Any amino acid
  VARIANT 43: note = Any amino acid
  VARIANT 44: note = Any amino acid
  VARIANT 45: note = Any amino acid
  VARIANT 46: note = Any amino acid
  VARIANT 47: note = Any amino acid
  VARIANT 48: note = Any amino acid
  VARIANT 49: note = Any amino acid
  VARIANT 50: note = Any amino acid
  VARIANT 51: note = Any amino acid
  VARIANT 52: note = Any amino acid
  VARIANT 53: note = Any amino acid
  VARIANT 54: note = Any amino acid
GXXXXXXXXXXXXXXXXXXXXXXXXXXXXXGXXXXXXXSGXXXXXXXXXXXXXXA

SEQ ID NO: 797346 - protein, 55 aa, unidentified
  VARIANT 2: note = Any amino acid
  VARIANT 3: note = Any amino acid
  VARIANT 4: note = Any amino acid
  VARIANT 5: note = Any amino acid
  VARIANT 6: note = Any amino acid
  VARIANT 7: note = Any amino acid
  VARIANT 8: note = Any amino acid
  VARIANT 9: note = Any amino acid
  VARIANT 10: note = Any amino acid
  VARIANT 11: note = Any amino acid
  VARIANT 12: note = Any amino acid
  VARIANT 13: note = Any amino acid
  VARIANT 14: note = Any amino acid
  VARIANT 15: note = Any amino acid
  VARIANT 16: note = Any amino acid
  VARIANT 17: note = Any amino acid
  VARIANT 18: note = Any amino acid
  VARIANT 19: note = Any amino acid
  VARIANT 20: note = Any amino acid
  VARIANT 21: note = Any amino acid
  VARIANT 22: note = Any amino acid
  VARIANT 23: note = Any amino acid
  VARIANT 24: note = Any amino acid
  VARIANT 25: note = Any amino acid
  VARIANT 26: note = Any amino acid
  VARIANT 27: note = Any amino acid
  VARIANT 28: note = Any amino acid
  VARIANT 29: note = Any amino acid
  VARIANT 30: note = Any amino acid
  VARIANT 32: note = Any amino acid
  VARIANT 33: note = Any amino acid
  VARIANT 34: note = Any amino acid
  VARIANT 35: note = Any amino acid
  VARIANT 36: note = Any amino acid
  VARIANT 37: note = Any amino acid
  VARIANT 38: note = Any amino acid
  VARIANT 41: note = Any amino acid
  VARIANT 42: note = Any amino acid
  VARIANT 43: note = Any amino acid
  VARIANT 44: note = Any amino acid
  VARIANT 45: note = Any amino acid
  VARIANT 46: note = Any amino acid
  VARIANT 47: note = Any amino acid
  VARIANT 48: note = Any amino acid
  VARIANT 49: note = Any amino acid
  VARIANT 50: note = Any amino acid
  VARIANT 51: note = Any amino acid
  VARIANT 52: note = Any amino acid
  VARIANT 53: note = Any amino acid
  VARIANT 54: note = Any amino acid
GXXXXXXXXXXXXXXXXXXXXXXXXXXXXXGXXXXXXXSGXXXXXXXXXXXXXXS

SEQ ID NO: 797347 - protein, 53 aa, unidentified
  VARIANT 2: note = Any amino acid
  VARIANT 3: note = Any amino acid
  VARIANT 4: note = Any amino acid
  VARIANT 5: note = Any amino acid
  VARIANT 6: note = Any amino acid
  VARIANT 7: note = Any amino acid
  VARIANT 8: note = Any amino acid
  VARIANT 9: note = Any amino acid
  VARIANT 10: note = Any amino acid
  VARIANT 11: note = Any amino acid
  VARIANT 12: note = Any amino acid
  VARIANT 13: note = Any amino acid
  VARIANT 14: note = Any amino acid
  VARIANT 15: note = Any amino acid
  VARIANT 16: note = Any amino acid
  VARIANT 17: note = Any amino acid
  VARIANT 18: note = Any amino acid
  VARIANT 19: note = Any amino acid
  VARIANT 20: note = Any amino acid
  VARIANT 21: note = Any amino acid
  VARIANT 22: note = Any amino acid
  VARIANT 23: note = Any amino acid
  VARIANT 24: note = Any amino acid
  VARIANT 25: note = Any amino acid
  VARIANT 26: note = Any amino acid
  VARIANT 27: note = Any amino acid
  VARIANT 28: note = Any amino acid
  VARIANT 29: note = Any amino acid
  VARIANT 30: note = Any amino acid
  VARIANT 32: note = Any amino acid
  VARIANT 33: note = Any amino acid
  VARIANT 34: note = Any amino acid
  VARIANT 35: note = Any amino acid
  VARIANT 36: note = Any amino acid
  VARIANT 37: note = Any amino acid
  VARIANT 38: note = Any amino acid
  VARIANT 41: note = Any amino acid
  VARIANT 42: note = Any amino acid
  VARIANT 43: note = Any amino acid
  VARIANT 44: note = Any amino acid
  VARIANT 45: note = Any amino acid
  VARIANT 46: note = Any amino acid
  VARIANT 47: note = Any amino acid
  VARIANT 48: note = Any amino acid
  VARIANT 49: note = Any amino acid
  VARIANT 50: note = Any amino acid
  VARIANT 51: note = Any amino acid
  VARIANT 52: note = Any amino acid
GXXXXXXXXXXXXXXXXXXXXXXXXXXXXXGXXXXXXXSSXXXXXXXXXXXXA

SEQ ID NO: 797348 - protein, 53 aa, unidentified
  VARIANT 2: note = Any amino acid
  VARIANT 3: note = Any amino acid
  VARIANT 4: note = Any amino acid
  VARIANT 5: note = Any amino acid
  VARIANT 6: note = Any amino acid
  VARIANT 7: note = Any amino acid
  VARIANT 8: note = Any amino acid
  VARIANT 9: note = Any amino acid
  VARIANT 10: note = Any amino acid
  VARIANT 11: note = Any amino acid
  VARIANT 12: note = Any amino acid
  VARIANT 13: note = Any amino acid
  VARIANT 14: note = Any amino acid
  VARIANT 15: note = Any amino acid
  VARIANT 16: note = Any amino acid
  VARIANT 17: note = Any amino acid
  VARIANT 18: note = Any amino acid
  VARIANT 19: note = Any amino acid
  VARIANT 20: note = Any amino acid
  VARIANT 21: note = Any amino acid
  VARIANT 22: note = Any amino acid
  VARIANT 23: note = Any amino acid
  VARIANT 24: note = Any amino acid
  VARIANT 25: note = Any amino acid
  VARIANT 26: note = Any amino acid
  VARIANT 27: note = Any amino acid
  VARIANT 28: note = Any amino acid
  VARIANT 29: note = Any amino acid
  VARIANT 30: note = Any amino acid
  VARIANT 32: note = Any amino acid
  VARIANT 33: note = Any amino acid
  VARIANT 34: note = Any amino acid
  VARIANT 35: note = Any amino acid
  VARIANT 36: note = Any amino acid
  VARIANT 37: note = Any amino acid
  VARIANT 38: note = Any amino acid
  VARIANT 41: note = Any amino acid
  VARIANT 42: note = Any amino acid
  VARIANT 43: note = Any amino acid
  VARIANT 44: note = Any amino acid
  VARIANT 45: note = Any amino acid
  VARIANT 46: note = Any amino acid
  VARIANT 47: note = Any amino acid
  VARIANT 48: note = Any amino acid
  VARIANT 49: note = Any amino acid
  VARIANT 50: note = Any amino acid
  VARIANT 51: note = Any amino acid
  VARIANT 52: note = Any amino acid
GXXXXXXXXXXXXXXXXXXXXXXXXXXXXXKXXXXXXXSGXXXXXXXXXXXXG

SEQ ID NO: 797349 - protein, 52 aa, unidentified
  VARIANT 2: note = Any amino acid
  VARIANT 3: note = Any amino acid
  VARIANT 4: note = Any amino acid
  VARIANT 5: note = Any amino acid
  VARIANT 6: note = Any amino acid
  VARIANT 7: note = Any amino acid
  VARIANT 8: note = Any amino acid
  VARIANT 9: note = Any amino acid
  VARIANT 10: note = Any amino acid
  VARIANT 11: note = Any amino acid
  VARIANT 12: note = Any amino acid
  VARIANT 13: note = Any amino acid
  VARIANT 14: note = Any amino acid
  VARIANT 15: note = Any amino acid
  VARIANT 16: note = Any amino acid
  VARIANT 17: note = Any amino acid
  VARIANT 18: note = Any amino acid
  VARIANT 19: note = Any amino acid
  VARIANT 20: note = Any amino acid
  VARIANT 21: note = Any amino acid
  VARIANT 22: note = Any amino acid
  VARIANT 23: note = Any amino acid
  VARIANT 24: note = Any amino acid
  VARIANT 25: note = Any amino acid
  VARIANT 26: note = Any amino acid
  VARIANT 27: note = Any amino acid
  VARIANT 28: note = Any amino acid
  VARIANT 29: note = Any amino acid
  VARIANT 30: note = Any amino acid
  VARIANT 31: note = Any amino acid
  VARIANT 33: note = Any amino acid
  VARIANT 34: note = Any amino acid
  VARIANT 35: note = Any amino acid
  VARIANT 36: note = Any amino acid
  VARIANT 37: note = Any amino acid
  VARIANT 38: note = Any amino acid
  VARIANT 39: note = Any amino acid
  VARIANT 42: note = Any amino acid
  VARIANT 43: note = Any amino acid
  VARIANT 44: note = Any amino acid
  VARIANT 45: note = Any amino acid
  VARIANT 46: note = Any amino acid
  VARIANT 47: note = Any amino acid
  VARIANT 48: note = Any amino acid
  VARIANT 49: note = Any amino acid
  VARIANT 50: note = Any amino acid
  VARIANT 51: note = Any amino acid
GXXXXXXXXXXXXXXXXXXXXXXXXXXXXXXCXXXXXXXSAXXXXXXXXXXS

SEQ ID NO: 797350 - protein, 52 aa, unidentified
  VARIANT 2: note = Any amino acid
  VARIANT 3: note = Any amino acid
  VARIANT 4: note = Any amino acid
  VARIANT 5: note = Any amino acid
  VARIANT 6: note = Any amino acid
  VARIANT 7: note = Any amino acid
  VARIANT 8: note = Any amino acid
  VARIANT 9: note = Any amino acid
  VARIANT 10: note = Any amino acid
  VARIANT 11: note = Any amino acid
  VARIANT 12: note = Any amino acid
  VARIANT 13: note = Any amino acid
  VARIANT 14: note = Any amino acid
  VARIANT 15: note = Any amino acid
  VARIANT 16: note = Any amino acid
  VARIANT 17: note = Any amino acid
  VARIANT 18: note = Any amino acid
  VARIANT 19: note = Any amino acid
  VARIANT 20: note = Any amino acid
  VARIANT 21: note = Any amino acid
  VARIANT 22: note = Any amino acid
  VARIANT 23: note = Any amino acid
  VARIANT 24: note = Any amino acid
  VARIANT 25: note = Any amino acid
  VARIANT 26: note = Any amino acid
  VARIANT 27: note = Any amino acid
  VARIANT 28: note = Any amino acid
  VARIANT 29: note = Any amino acid
  VARIANT 30: note = Any amino acid
  VARIANT 31: note = Any amino acid
  VARIANT 33: note = Any amino acid
  VARIANT 34: note = Any amino acid
  VARIANT 35: note = Any amino acid
  VARIANT 36: note = Any amino acid
  VARIANT 37: note = Any amino acid
  VARIANT 38: note = Any amino acid
  VARIANT 39: note = Any amino acid
  VARIANT 42: note = Any amino acid
  VARIANT 43: note = Any amino acid
  VARIANT 44: note = Any amino acid
  VARIANT 45: note = Any amino acid
  VARIANT 46: note = Any amino acid
  VARIANT 47: note = Any amino acid
  VARIANT 48: note = Any amino acid
  VARIANT 49: note = Any amino acid
  VARIANT 50: note = Any amino acid
  VARIANT 51: note = Any amino acid
GXXXXXXXXXXXXXXXXXXXXXXXXXXXXXXCXXXXXXXTGXXXXXXXXXXT

SEQ ID NO: 797351 - protein, 52 aa, unidentified
  VARIANT 2: note = Any amino acid
  VARIANT 3: note = Any amino acid
  VARIANT 4: note = Any amino acid
  VARIANT 5: note = Any amino acid
  VARIANT 6: note = Any amino acid
  VARIANT 7: note = Any amino acid
  VARIANT 8: note = Any amino acid
  VARIANT 9: note = Any amino acid
  VARIANT 10: note = Any amino acid
  VARIANT 11: note = Any amino acid
  VARIANT 12: note = Any amino acid
  VARIANT 13: note = Any amino acid
  VARIANT 14: note = Any amino acid
  VARIANT 15: note = Any amino acid
  VARIANT 16: note = Any amino acid
  VARIANT 17: note = Any amino acid
  VARIANT 18: note = Any amino acid
  VARIANT 19: note = Any amino acid
  VARIANT 20: note = Any amino acid
  VARIANT 21: note = Any amino acid
  VARIANT 22: note = Any amino acid
  VARIANT 23: note = Any amino acid
  VARIANT 24: note = Any amino acid
  VARIANT 25: note = Any amino acid
  VARIANT 26: note = Any amino acid
  VARIANT 27: note = Any amino acid
  VARIANT 28: note = Any amino acid
  VARIANT 29: note = Any amino acid
  VARIANT 30: note = Any amino acid
  VARIANT 31: note = Any amino acid
  VARIANT 33: note = Any amino acid
  VARIANT 34: note = Any amino acid
  VARIANT 35: note = Any amino acid
  VARIANT 36: note = Any amino acid
  VARIANT 37: note = Any amino acid
  VARIANT 38: note = Any amino acid
  VARIANT 39: note = Any amino acid
  VARIANT 42: note = Any amino acid
  VARIANT 43: note = Any amino acid
  VARIANT 44: note = Any amino acid
  VARIANT 45: note = Any amino acid
  VARIANT 46: note = Any amino acid
  VARIANT 47: note = Any amino acid
  VARIANT 48: note = Any amino acid
  VARIANT 49: note = Any amino acid
  VARIANT 50: note = Any amino acid
  VARIANT 51: note = Any amino acid
GXXXXXXXXXXXXXXXXXXXXXXXXXXXXXXGXXXXXXXRGXXXXXXXXXXG

SEQ ID NO: 797352 - protein, 53 aa, unidentified
  VARIANT 2: note = Any amino acid
  VARIANT 3: note = Any amino acid
  VARIANT 4: note = Any amino acid
  VARIANT 5: note = Any amino acid
  VARIANT 6: note = Any amino acid
  VARIANT 7: note = Any amino acid
  VARIANT 8: note = Any amino acid
  VARIANT 9: note = Any amino acid
  VARIANT 10: note = Any amino acid
  VARIANT 11: note = Any amino acid
  VARIANT 12: note = Any amino acid
  VARIANT 13: note = Any amino acid
  VARIANT 14: note = Any amino acid
  VARIANT 15: note = Any amino acid
  VARIANT 16: note = Any amino acid
  VARIANT 17: note = Any amino acid
  VARIANT 18: note = Any amino acid
  VARIANT 19: note = Any amino acid
  VARIANT 20: note = Any amino acid
  VARIANT 21: note = Any amino acid
  VARIANT 22: note = Any amino acid
  VARIANT 23: note = Any amino acid
  VARIANT 24: note = Any amino acid
  VARIANT 25: note = Any amino acid
  VARIANT 26: note = Any amino acid
  VARIANT 27: note = Any amino acid
  VARIANT 28: note = Any amino acid
  VARIANT 29: note = Any amino acid
  VARIANT 30: note = Any amino acid
  VARIANT 31: note = Any amino acid
  VARIANT 33: note = Any amino acid
  VARIANT 34: note = Any amino acid
  VARIANT 35: note = Any amino acid
  VARIANT 36: note = Any amino acid
  VARIANT 37: note = Any amino acid
  VARIANT 38: note = Any amino acid
  VARIANT 39: note = Any amino acid
  VARIANT 42: note = Any amino acid
  VARIANT 43: note = Any amino acid
  VARIANT 44: note = Any amino acid
  VARIANT 45: note = Any amino acid
  VARIANT 46: note = Any amino acid
  VARIANT 47: note = Any amino acid
  VARIANT 48: note = Any amino acid
  VARIANT 49: note = Any amino acid
  VARIANT 50: note = Any amino acid
  VARIANT 51: note = Any amino acid
  VARIANT 52: note = Any amino acid
GXXXXXXXXXXXXXXXXXXXXXXXXXXXXXXGXXXXXXXSAXXXXXXXXXXXA

SEQ ID NO: 797353 - protein, 52 aa, unidentified
  VARIANT 2: note = Any amino acid
  VARIANT 3: note = Any amino acid
  VARIANT 4: note = Any amino acid
  VARIANT 5: note = Any amino acid
  VARIANT 6: note = Any amino acid
  VARIANT 7: note = Any amino acid
  VARIANT 8: note = Any amino acid
  VARIANT 9: note = Any amino acid
  VARIANT 10: note = Any amino acid
  VARIANT 11: note = Any amino acid
  VARIANT 12: note = Any amino acid
  VARIANT 13: note = Any amino acid
  VARIANT 14: note = Any amino acid
  VARIANT 15: note = Any amino acid
  VARIANT 16: note = Any amino acid
  VARIANT 17: note = Any amino acid
  VARIANT 18: note = Any amino acid
  VARIANT 19: note = Any amino acid
  VARIANT 20: note = Any amino acid
  VARIANT 21: note = Any amino acid
  VARIANT 22: note = Any amino acid
  VARIANT 23: note = Any amino acid
  VARIANT 24: note = Any amino acid
  VARIANT 25: note = Any amino acid
  VARIANT 26: note = Any amino acid
  VARIANT 27: note = Any amino acid
  VARIANT 28: note = Any amino acid
  VARIANT 29: note = Any amino acid
  VARIANT 30: note = Any amino acid
  VARIANT 31: note = Any amino acid
  VARIANT 33: note = Any amino acid
  VARIANT 34: note = Any amino acid
  VARIANT 35: note = Any amino acid
  VARIANT 36: note = Any amino acid
  VARIANT 37: note = Any amino acid
  VARIANT 38: note = Any amino acid
  VARIANT 39: note = Any amino acid
  VARIANT 42: note = Any amino acid
  VARIANT 43: note = Any amino acid
  VARIANT 44: note = Any amino acid
  VARIANT 45: note = Any amino acid
  VARIANT 46: note = Any amino acid
  VARIANT 47: note = Any amino acid
  VARIANT 48: note = Any amino acid
  VARIANT 49: note = Any amino acid
  VARIANT 50: note = Any amino acid
  VARIANT 51: note = Any amino acid
GXXXXXXXXXXXXXXXXXXXXXXXXXXXXXXGXXXXXXXTGXXXXXXXXXXS

SEQ ID NO: 797354 - protein, 53 aa, unidentified
  VARIANT 2: note = Any amino acid
  VARIANT 3: note = Any amino acid
  VARIANT 4: note = Any amino acid
  VARIANT 5: note = Any amino acid
  VARIANT 6: note = Any amino acid
  VARIANT 7: note = Any amino acid
  VARIANT 8: note = Any amino acid
  VARIANT 9: note = Any amino acid
  VARIANT 10: note = Any amino acid
  VARIANT 11: note = Any amino acid
  VARIANT 12: note = Any amino acid
  VARIANT 13: note = Any amino acid
  VARIANT 14: note = Any amino acid
  VARIANT 15: note = Any amino acid
  VARIANT 16: note = Any amino acid
  VARIANT 17: note = Any amino acid
  VARIANT 18: note = Any amino acid
  VARIANT 19: note = Any amino acid
  VARIANT 20: note = Any amino acid
  VARIANT 21: note = Any amino acid
  VARIANT 22: note = Any amino acid
  VARIANT 23: note = Any amino acid
  VARIANT 24: note = Any amino acid
  VARIANT 25: note = Any amino acid
  VARIANT 26: note = Any amino acid
  VARIANT 27: note = Any amino acid
  VARIANT 28: note = Any amino acid
  VARIANT 29: note = Any amino acid
  VARIANT 30: note = Any amino acid
  VARIANT 31: note = Any amino acid
  VARIANT 33: note = Any amino acid
  VARIANT 34: note = Any amino acid
  VARIANT 35: note = Any amino acid
  VARIANT 36: note = Any amino acid
  VARIANT 37: note = Any amino acid
  VARIANT 38: note = Any amino acid
  VARIANT 39: note = Any amino acid
  VARIANT 42: note = Any amino acid
  VARIANT 43: note = Any amino acid
  VARIANT 44: note = Any amino acid
  VARIANT 45: note = Any amino acid
  VARIANT 46: note = Any amino acid
  VARIANT 47: note = Any amino acid
  VARIANT 48: note = Any amino acid
  VARIANT 49: note = Any amino acid
  VARIANT 50: note = Any amino acid
  VARIANT 51: note = Any amino acid
  VARIANT 52: note = Any amino acid
GXXXXXXXXXXXXXXXXXXXXXXXXXXXXXXKXXXXXXXSGXXXXXXXXXXXT

SEQ ID NO: 797355 - protein, 52 aa, unidentified
  VARIANT 2: note = Any amino acid
  VARIANT 3: note = Any amino acid
  VARIANT 4: note = Any amino acid
  VARIANT 5: note = Any amino acid
  VARIANT 6: note = Any amino acid
  VARIANT 7: note = Any amino acid
  VARIANT 8: note = Any amino acid
  VARIANT 9: note = Any amino acid
  VARIANT 10: note = Any amino acid
  VARIANT 11: note = Any amino acid
  VARIANT 12: note = Any amino acid
  VARIANT 13: note = Any amino acid
  VARIANT 14: note = Any amino acid
  VARIANT 15: note = Any amino acid
  VARIANT 16: note = Any amino acid
  VARIANT 17: note = Any amino acid
  VARIANT 18: note = Any amino acid
  VARIANT 19: note = Any amino acid
  VARIANT 20: note = Any amino acid
  VARIANT 21: note = Any amino acid
  VARIANT 22: note = Any amino acid
  VARIANT 23: note = Any amino acid
  VARIANT 24: note = Any amino acid
  VARIANT 25: note = Any amino acid
  VARIANT 26: note = Any amino acid
  VARIANT 27: note = Any amino acid
  VARIANT 28: note = Any amino acid
  VARIANT 29: note = Any amino acid
  VARIANT 30: note = Any amino acid
  VARIANT 31: note = Any amino acid
  VARIANT 33: note = Any amino acid
  VARIANT 34: note = Any amino acid
  VARIANT 35: note = Any amino acid
  VARIANT 36: note = Any amino acid
  VARIANT 37: note = Any amino acid
  VARIANT 38: note = Any amino acid
  VARIANT 39: note = Any amino acid
  VARIANT 42: note = Any amino acid
  VARIANT 43: note = Any amino acid
  VARIANT 44: note = Any amino acid
  VARIANT 45: note = Any amino acid
  VARIANT 46: note = Any amino acid
  VARIANT 47: note = Any amino acid
  VARIANT 48: note = Any amino acid
  VARIANT 49: note = Any amino acid
  VARIANT 50: note = Any amino acid
  VARIANT 51: note = Any amino acid
GXXXXXXXXXXXXXXXXXXXXXXXXXXXXXXMXXXXXXXSGXXXXXXXXXXG

SEQ ID NO: 797356 - protein, 53 aa, unidentified
  VARIANT 2: note = Any amino acid
  VARIANT 3: note = Any amino acid
  VARIANT 4: note = Any amino acid
  VARIANT 5: note = Any amino acid
  VARIANT 6: note = Any amino acid
  VARIANT 7: note = Any amino acid
  VARIANT 8: note = Any amino acid
  VARIANT 9: note = Any amino acid
  VARIANT 10: note = Any amino acid
  VARIANT 11: note = Any amino acid
  VARIANT 12: note = Any amino acid
  VARIANT 13: note = Any amino acid
  VARIANT 14: note = Any amino acid
  VARIANT 15: note = Any amino acid
  VARIANT 16: note = Any amino acid
  VARIANT 17: note = Any amino acid
  VARIANT 18: note = Any amino acid
  VARIANT 19: note = Any amino acid
  VARIANT 20: note = Any amino acid
  VARIANT 21: note = Any amino acid
  VARIANT 22: note = Any amino acid
  VARIANT 23: note = Any amino acid
  VARIANT 24: note = Any amino acid
  VARIANT 25: note = Any amino acid
  VARIANT 26: note = Any amino acid
  VARIANT 27: note = Any amino acid
  VARIANT 28: note = Any amino acid
  VARIANT 29: note = Any amino acid
  VARIANT 30: note = Any amino acid
  VARIANT 31: note = Any amino acid
  VARIANT 33: note = Any amino acid
  VARIANT 34: note = Any amino acid
  VARIANT 35: note = Any amino acid
  VARIANT 36: note = Any amino acid
  VARIANT 37: note = Any amino acid
  VARIANT 38: note = Any amino acid
  VARIANT 39: note = Any amino acid
  VARIANT 42: note = Any amino acid
  VARIANT 43: note = Any amino acid
  VARIANT 44: note = Any amino acid
  VARIANT 45: note = Any amino acid
  VARIANT 46: note = Any amino acid
  VARIANT 47: note = Any amino acid
  VARIANT 48: note = Any amino acid
  VARIANT 49: note = Any amino acid
  VARIANT 50: note = Any amino acid
  VARIANT 51: note = Any amino acid
  VARIANT 52: note = Any amino acid
GXXXXXXXXXXXXXXXXXXXXXXXXXXXXXXNXXXXXXXSGXXXXXXXXXXXR

SEQ ID NO: 797357 - protein, 54 aa, unidentified
  VARIANT 2: note = Any amino acid
  VARIANT 3: note = Any amino acid
  VARIANT 4: note = Any amino acid
  VARIANT 5: note = Any amino acid
  VARIANT 6: note = Any amino acid
  VARIANT 7: note = Any amino acid
  VARIANT 8: note = Any amino acid
  VARIANT 9: note = Any amino acid
  VARIANT 10: note = Any amino acid
  VARIANT 11: note = Any amino acid
  VARIANT 12: note = Any amino acid
  VARIANT 13: note = Any amino acid
  VARIANT 14: note = Any amino acid
  VARIANT 15: note = Any amino acid
  VARIANT 16: note = Any amino acid
  VARIANT 17: note = Any amino acid
  VARIANT 18: note = Any amino acid
  VARIANT 19: note = Any amino acid
  VARIANT 20: note = Any amino acid
  VARIANT 21: note = Any amino acid
  VARIANT 22: note = Any amino acid
  VARIANT 23: note = Any amino acid
  VARIANT 24: note = Any amino acid
  VARIANT 25: note = Any amino acid
  VARIANT 26: note = Any amino acid
  VARIANT 27: note = Any amino acid
  VARIANT 28: note = Any amino acid
  VARIANT 29: note = Any amino acid
  VARIANT 30: note = Any amino acid
  VARIANT 31: note = Any amino acid
  VARIANT 32: note = Any amino acid
  VARIANT 34: note = Any amino acid
  VARIANT 35: note = Any amino acid
  VARIANT 36: note = Any amino acid
  VARIANT 37: note = Any amino acid
  VARIANT 38: note = Any amino acid
  VARIANT 39: note = Any amino acid
  VARIANT 40: note = Any amino acid
  VARIANT 43: note = Any amino acid
  VARIANT 44: note = Any amino acid
  VARIANT 45: note = Any amino acid
  VARIANT 46: note = Any amino acid
  VARIANT 47: note = Any amino acid
  VARIANT 48: note = Any amino acid
  VARIANT 49: note = Any amino acid
  VARIANT 50: note = Any amino acid
  VARIANT 51: note = Any amino acid
  VARIANT 52: note = Any amino acid
  VARIANT 53: note = Any amino acid
GXXXXXXXXXXXXXXXXXXXXXXXXXXXXXXXGXXXXXXXSGXXXXXXXXXXXK

SEQ ID NO: 797358 - protein, 56 aa, unidentified
  VARIANT 2: note = Any amino acid
  VARIANT 3: note = Any amino acid
  VARIANT 4: note = Any amino acid
  VARIANT 5: note = Any amino acid
  VARIANT 6: note = Any amino acid
  VARIANT 7: note = Any amino acid
  VARIANT 8: note = Any amino acid
  VARIANT 9: note = Any amino acid
  VARIANT 10: note = Any amino acid
  VARIANT 11: note = Any amino acid
  VARIANT 12: note = Any amino acid
  VARIANT 13: note = Any amino acid
  VARIANT 14: note = Any amino acid
  VARIANT 15: note = Any amino acid
  VARIANT 16: note = Any amino acid
  VARIANT 17: note = Any amino acid
  VARIANT 18: note = Any amino acid
  VARIANT 19: note = Any amino acid
  VARIANT 20: note = Any amino acid
  VARIANT 21: note = Any amino acid
  VARIANT 22: note = Any amino acid
  VARIANT 23: note = Any amino acid
  VARIANT 24: note = Any amino acid
  VARIANT 25: note = Any amino acid
  VARIANT 26: note = Any amino acid
  VARIANT 27: note = Any amino acid
  VARIANT 28: note = Any amino acid
  VARIANT 29: note = Any amino acid
  VARIANT 30: note = Any amino acid
  VARIANT 31: note = Any amino acid
  VARIANT 32: note = Any amino acid
  VARIANT 33: note = Any amino acid
  VARIANT 34: note = Any amino acid
  VARIANT 35: note = Any amino acid
  VARIANT 37: note = Any amino acid
  VARIANT 38: note = Any amino acid
  VARIANT 39: note = Any amino acid
  VARIANT 40: note = Any amino acid
  VARIANT 41: note = Any amino acid
  VARIANT 42: note = Any amino acid
  VARIANT 43: note = Any amino acid
  VARIANT 46: note = Any amino acid
  VARIANT 47: note = Any amino acid
  VARIANT 48: note = Any amino acid
  VARIANT 49: note = Any amino acid
  VARIANT 50: note = Any amino acid
  VARIANT 51: note = Any amino acid
  VARIANT 52: note = Any amino acid
  VARIANT 53: note = Any amino acid
  VARIANT 54: note = Any amino acid
  VARIANT 55: note = Any amino acid
GXXXXXXXXXXXXXXXXXXXXXXXXXXXXXXXXXXGXXXXXXXSGXXXXXXXXXXC

SEQ ID NO: 797359 - protein, 51 aa, unidentified
  VARIANT 2: note = Any amino acid
  VARIANT 3: note = Any amino acid
  VARIANT 4: note = Any amino acid
  VARIANT 5: note = Any amino acid
  VARIANT 6: note = Any amino acid
  VARIANT 7: note = Any amino acid
  VARIANT 8: note = Any amino acid
  VARIANT 9: note = Any amino acid
  VARIANT 10: note = Any amino acid
  VARIANT 11: note = Any amino acid
  VARIANT 12: note = Any amino acid
  VARIANT 13: note = Any amino acid
  VARIANT 14: note = Any amino acid
  VARIANT 15: note = Any amino acid
  VARIANT 16: note = Any amino acid
  VARIANT 17: note = Any amino acid
  VARIANT 18: note = Any amino acid
  VARIANT 19: note = Any amino acid
  VARIANT 20: note = Any amino acid
  VARIANT 21: note = Any amino acid
  VARIANT 22: note = Any amino acid
  VARIANT 23: note = Any amino acid
  VARIANT 24: note = Any amino acid
  VARIANT 25: note = Any amino acid
  VARIANT 26: note = Any amino acid
  VARIANT 27: note = Any amino acid
  VARIANT 28: note = Any amino acid
  VARIANT 29: note = Any amino acid
  VARIANT 30: note = Any amino acid
  VARIANT 32: note = Any amino acid
  VARIANT 33: note = Any amino acid
  VARIANT 34: note = Any amino acid
  VARIANT 35: note = Any amino acid
  VARIANT 36: note = Any amino acid
  VARIANT 37: note = Any amino acid
  VARIANT 38: note = Any amino acid
  VARIANT 41: note = Any amino acid
  VARIANT 42: note = Any amino acid
  VARIANT 43: note = Any amino acid
  VARIANT 44: note = Any amino acid
  VARIANT 45: note = Any amino acid
  VARIANT 46: note = Any amino acid
  VARIANT 47: note = Any amino acid
  VARIANT 48: note = Any amino acid
  VARIANT 49: note = Any amino acid
  VARIANT 50: note = Any amino acid
RXXXXXXXXXXXXXXXXXXXXXXXXXXXXXGXXXXXXXSGXXXXXXXXXXG

SEQ ID NO: 797360 - protein, 53 aa, unidentified
  VARIANT 2: note = Any amino acid
  VARIANT 3: note = Any amino acid
  VARIANT 4: note = Any amino acid
  VARIANT 5: note = Any amino acid
  VARIANT 6: note = Any amino acid
  VARIANT 7: note = Any amino acid
  VARIANT 8: note = Any amino acid
  VARIANT 9: note = Any amino acid
  VARIANT 10: note = Any amino acid
  VARIANT 11: note = Any amino acid
  VARIANT 12: note = Any amino acid
  VARIANT 13: note = Any amino acid
  VARIANT 14: note = Any amino acid
  VARIANT 15: note = Any amino acid
  VARIANT 16: note = Any amino acid
  VARIANT 17: note = Any amino acid
  VARIANT 18: note = Any amino acid
  VARIANT 19: note = Any amino acid
  VARIANT 20: note = Any amino acid
  VARIANT 21: note = Any amino acid
  VARIANT 22: note = Any amino acid
  VARIANT 23: note = Any amino acid
  VARIANT 24: note = Any amino acid
  VARIANT 25: note = Any amino acid
  VARIANT 26: note = Any amino acid
  VARIANT 27: note = Any amino acid
  VARIANT 28: note = Any amino acid
  VARIANT 29: note = Any amino acid
  VARIANT 30: note = Any amino acid
  VARIANT 31: note = Any amino acid
  VARIANT 32: note = Any amino acid
  VARIANT 34: note = Any amino acid
  VARIANT 35: note = Any amino acid
  VARIANT 36: note = Any amino acid
  VARIANT 37: note = Any amino acid
  VARIANT 38: note = Any amino acid
  VARIANT 39: note = Any amino acid
  VARIANT 40: note = Any amino acid
  VARIANT 43: note = Any amino acid
  VARIANT 44: note = Any amino acid
  VARIANT 45: note = Any amino acid
  VARIANT 46: note = Any amino acid
  VARIANT 47: note = Any amino acid
  VARIANT 48: note = Any amino acid
  VARIANT 49: note = Any amino acid
  VARIANT 50: note = Any amino acid
  VARIANT 51: note = Any amino acid
  VARIANT 52: note = Any amino acid
SXXXXXXXXXXXXXXXXXXXXXXXXXXXXXXXGXXXXXXXSAXXXXXXXXXXA

SEQ ID NO: 797361 - protein, 51 aa, unidentified
  VARIANT 2: note = Any amino acid
  VARIANT 3: note = Any amino acid
  VARIANT 4: note = Any amino acid
  VARIANT 5: note = Any amino acid
  VARIANT 6: note = Any amino acid
  VARIANT 7: note = Any amino acid
  VARIANT 8: note = Any amino acid
  VARIANT 9: note = Any amino acid
  VARIANT 10: note = Any amino acid
  VARIANT 11: note = Any amino acid
  VARIANT 12: note = Any amino acid
  VARIANT 13: note = Any amino acid
  VARIANT 14: note = Any amino acid
  VARIANT 15: note = Any amino acid
  VARIANT 16: note = Any amino acid
  VARIANT 17: note = Any amino acid
  VARIANT 18: note = Any amino acid
  VARIANT 19: note = Any amino acid
  VARIANT 20: note = Any amino acid
  VARIANT 21: note = Any amino acid
  VARIANT 22: note = Any amino acid
  VARIANT 23: note = Any amino acid
  VARIANT 24: note = Any amino acid
  VARIANT 25: note = Any amino acid
  VARIANT 26: note = Any amino acid
  VARIANT 27: note = Any amino acid
  VARIANT 28: note = Any amino acid
  VARIANT 29: note = Any amino acid
  VARIANT 30: note = Any amino acid
  VARIANT 32: note = Any amino acid
  VARIANT 33: note = Any amino acid
  VARIANT 34: note = Any amino acid
  VARIANT 35: note = Any amino acid
  VARIANT 36: note = Any amino acid
  VARIANT 37: note = Any amino acid
  VARIANT 38: note = Any amino acid
  VARIANT 41: note = Any amino acid
  VARIANT 42: note = Any amino acid
  VARIANT 43: note = Any amino acid
  VARIANT 44: note = Any amino acid
  VARIANT 45: note = Any amino acid
  VARIANT 46: note = Any amino acid
  VARIANT 47: note = Any amino acid
  VARIANT 48: note = Any amino acid
  VARIANT 49: note = Any amino acid
  VARIANT 50: note = Any amino acid
CXXXXXXXXXXXXXXXXXXXXXXXXXXXXXGXXXXXXXSGXXXXXXXXXXG

SEQ ID NO: 797362 - protein, 52 aa, unidentified
  VARIANT 2: note = Any amino acid
  VARIANT 3: note = Any amino acid
  VARIANT 4: note = Any amino acid
  VARIANT 5: note = Any amino acid
  VARIANT 6: note = Any amino acid
  VARIANT 7: note = Any amino acid
  VARIANT 8: note = Any amino acid
  VARIANT 9: note = Any amino acid
  VARIANT 10: note = Any amino acid
  VARIANT 11: note = Any amino acid
  VARIANT 12: note = Any amino acid
  VARIANT 13: note = Any amino acid
  VARIANT 14: note = Any amino acid
  VARIANT 15: note = Any amino acid
  VARIANT 16: note = Any amino acid
  VARIANT 17: note = Any amino acid
  VARIANT 18: note = Any amino acid
  VARIANT 19: note = Any amino acid
  VARIANT 20: note = Any amino acid
  VARIANT 21: note = Any amino acid
  VARIANT 22: note = Any amino acid
  VARIANT 23: note = Any amino acid
  VARIANT 24: note = Any amino acid
  VARIANT 25: note = Any amino acid
  VARIANT 26: note = Any amino acid
  VARIANT 27: note = Any amino acid
  VARIANT 28: note = Any amino acid
  VARIANT 29: note = Any amino acid
  VARIANT 30: note = Any amino acid
  VARIANT 31: note = Any amino acid
  VARIANT 33: note = Any amino acid
  VARIANT 34: note = Any amino acid
  VARIANT 35: note = Any amino acid
  VARIANT 36: note = Any amino acid
  VARIANT 37: note = Any amino acid
  VARIANT 38: note = Any amino acid
  VARIANT 39: note = Any amino acid
  VARIANT 42: note = Any amino acid
  VARIANT 43: note = Any amino acid
  VARIANT 44: note = Any amino acid
  VARIANT 45: note = Any amino acid
  VARIANT 46: note = Any amino acid
  VARIANT 47: note = Any amino acid
  VARIANT 48: note = Any amino acid
  VARIANT 49: note = Any amino acid
  VARIANT 50: note = Any amino acid
  VARIANT 51: note = Any amino acid
CXXXXXXXXXXXXXXXXXXXXXXXXXXXXXXGXXXXXXXSAXXXXXXXXXXG

SEQ ID NO: 797363 - protein, 53 aa, unidentified
  VARIANT 2: note = Any amino acid
  VARIANT 3: note = Any amino acid
  VARIANT 4: note = Any amino acid
  VARIANT 5: note = Any amino acid
  VARIANT 6: note = Any amino acid
  VARIANT 7: note = Any amino acid
  VARIANT 8: note = Any amino acid
  VARIANT 9: note = Any amino acid
  VARIANT 10: note = Any amino acid
  VARIANT 11: note = Any amino acid
  VARIANT 12: note = Any amino acid
  VARIANT 13: note = Any amino acid
  VARIANT 14: note = Any amino acid
  VARIANT 15: note = Any amino acid
  VARIANT 16: note = Any amino acid
  VARIANT 17: note = Any amino acid
  VARIANT 18: note = Any amino acid
  VARIANT 19: note = Any amino acid
  VARIANT 20: note = Any amino acid
  VARIANT 21: note = Any amino acid
  VARIANT 22: note = Any amino acid
  VARIANT 23: note = Any amino acid
  VARIANT 24: note = Any amino acid
  VARIANT 25: note = Any amino acid
  VARIANT 26: note = Any amino acid
  VARIANT 27: note = Any amino acid
  VARIANT 28: note = Any amino acid
  VARIANT 29: note = Any amino acid
  VARIANT 30: note = Any amino acid
  VARIANT 32: note = Any amino acid
  VARIANT 33: note = Any amino acid
  VARIANT 34: note = Any amino acid
  VARIANT 35: note = Any amino acid
  VARIANT 36: note = Any amino acid
  VARIANT 37: note = Any amino acid
  VARIANT 38: note = Any amino acid
  VARIANT 41: note = Any amino acid
  VARIANT 42: note = Any amino acid
  VARIANT 43: note = Any amino acid
  VARIANT 44: note = Any amino acid
  VARIANT 45: note = Any amino acid
  VARIANT 46: note = Any amino acid
  VARIANT 47: note = Any amino acid
  VARIANT 48: note = Any amino acid
  VARIANT 49: note = Any amino acid
  VARIANT 50: note = Any amino acid
  VARIANT 51: note = Any amino acid
  VARIANT 52: note = Any amino acid
GXXXXXXXXXXXXXXXXXXXXXXXXXXXXXGXXXXXXXSGXXXXXXXXXXXXV

SEQ ID NO: 797364 - protein, 52 aa, unidentified
  VARIANT 2: note = Any amino acid
  VARIANT 3: note = Any amino acid
  VARIANT 4: note = Any amino acid
  VARIANT 5: note = Any amino acid
  VARIANT 6: note = Any amino acid
  VARIANT 7: note = Any amino acid
  VARIANT 8: note = Any amino acid
  VARIANT 9: note = Any amino acid
  VARIANT 10: note = Any amino acid
  VARIANT 11: note = Any amino acid
  VARIANT 12: note = Any amino acid
  VARIANT 13: note = Any amino acid
  VARIANT 14: note = Any amino acid
  VARIANT 15: note = Any amino acid
  VARIANT 16: note = Any amino acid
  VARIANT 17: note = Any amino acid
  VARIANT 18: note = Any amino acid
  VARIANT 19: note = Any amino acid
  VARIANT 20: note = Any amino acid
  VARIANT 21: note = Any amino acid
  VARIANT 22: note = Any amino acid
  VARIANT 23: note = Any amino acid
  VARIANT 24: note = Any amino acid
  VARIANT 25: note = Any amino acid
  VARIANT 26: note = Any amino acid
  VARIANT 27: note = Any amino acid
  VARIANT 28: note = Any amino acid
  VARIANT 29: note = Any amino acid
  VARIANT 30: note = Any amino acid
  VARIANT 31: note = Any amino acid
  VARIANT 33: note = Any amino acid
  VARIANT 34: note = Any amino acid
  VARIANT 35: note = Any amino acid
  VARIANT 36: note = Any amino acid
  VARIANT 37: note = Any amino acid
  VARIANT 38: note = Any amino acid
  VARIANT 39: note = Any amino acid
  VARIANT 42: note = Any amino acid
  VARIANT 43: note = Any amino acid
  VARIANT 44: note = Any amino acid
  VARIANT 45: note = Any amino acid
  VARIANT 46: note = Any amino acid
  VARIANT 47: note = Any amino acid
  VARIANT 48: note = Any amino acid
  VARIANT 49: note = Any amino acid
  VARIANT 50: note = Any amino acid
  VARIANT 51: note = Any amino acid
GXXXXXXXXXXXXXXXXXXXXXXXXXXXXXXAXXXXXXXTGXXXXXXXXXXV

SEQ ID NO: 797365 - protein, 52 aa, unidentified
  VARIANT 2: note = Any amino acid
  VARIANT 3: note = Any amino acid
  VARIANT 4: note = Any amino acid
  VARIANT 5: note = Any amino acid
  VARIANT 6: note = Any amino acid
  VARIANT 7: note = Any amino acid
  VARIANT 8: note = Any amino acid
  VARIANT 9: note = Any amino acid
  VARIANT 10: note = Any amino acid
  VARIANT 11: note = Any amino acid
  VARIANT 12: note = Any amino acid
  VARIANT 13: note = Any amino acid
  VARIANT 14: note = Any amino acid
  VARIANT 15: note = Any amino acid
  VARIANT 16: note = Any amino acid
  VARIANT 17: note = Any amino acid
  VARIANT 18: note = Any amino acid
  VARIANT 19: note = Any amino acid
  VARIANT 20: note = Any amino acid
  VARIANT 21: note = Any amino acid
  VARIANT 22: note = Any amino acid
  VARIANT 23: note = Any amino acid
  VARIANT 24: note = Any amino acid
  VARIANT 25: note = Any amino acid
  VARIANT 26: note = Any amino acid
  VARIANT 27: note = Any amino acid
  VARIANT 28: note = Any amino acid
  VARIANT 29: note = Any amino acid
  VARIANT 30: note = Any amino acid
  VARIANT 31: note = Any amino acid
  VARIANT 33: note = Any amino acid
  VARIANT 34: note = Any amino acid
  VARIANT 35: note = Any amino acid
  VARIANT 36: note = Any amino acid
  VARIANT 37: note = Any amino acid
  VARIANT 38: note = Any amino acid
  VARIANT 39: note = Any amino acid
  VARIANT 42: note = Any amino acid
  VARIANT 43: note = Any amino acid
  VARIANT 44: note = Any amino acid
  VARIANT 45: note = Any amino acid
  VARIANT 46: note = Any amino acid
  VARIANT 47: note = Any amino acid
  VARIANT 48: note = Any amino acid
  VARIANT 49: note = Any amino acid
  VARIANT 50: note = Any amino acid
  VARIANT 51: note = Any amino acid
GXXXXXXXXXXXXXXXXXXXXXXXXXXXXXXGXXXXXXXPGXXXXXXXXXXG

SEQ ID NO: 797366 - protein, 50 aa, unidentified
  VARIANT 2: note = Any amino acid
  VARIANT 3: note = Any amino acid
  VARIANT 4: note = Any amino acid
  VARIANT 5: note = Any amino acid
  VARIANT 6: note = Any amino acid
  VARIANT 7: note = Any amino acid
  VARIANT 8: note = Any amino acid
  VARIANT 9: note = Any amino acid
  VARIANT 10: note = Any amino acid
  VARIANT 11: note = Any amino acid
  VARIANT 12: note = Any amino acid
  VARIANT 13: note = Any amino acid
  VARIANT 14: note = Any amino acid
  VARIANT 15: note = Any amino acid
  VARIANT 16: note = Any amino acid
  VARIANT 17: note = Any amino acid
  VARIANT 18: note = Any amino acid
  VARIANT 19: note = Any amino acid
  VARIANT 20: note = Any amino acid
  VARIANT 21: note = Any amino acid
  VARIANT 22: note = Any amino acid
  VARIANT 23: note = Any amino acid
  VARIANT 24: note = Any amino acid
  VARIANT 25: note = Any amino acid
  VARIANT 26: note = Any amino acid
  VARIANT 27: note = Any amino acid
  VARIANT 28: note = Any amino acid
  VARIANT 29: note = Any amino acid
  VARIANT 30: note = Any amino acid
  VARIANT 31: note = Any amino acid
  VARIANT 33: note = Any amino acid
  VARIANT 34: note = Any amino acid
  VARIANT 35: note = Any amino acid
  VARIANT 36: note = Any amino acid
  VARIANT 37: note = Any amino acid
  VARIANT 38: note = Any amino acid
  VARIANT 39: note = Any amino acid
  VARIANT 42: note = Any amino acid
  VARIANT 43: note = Any amino acid
  VARIANT 44: note = Any amino acid
  VARIANT 45: note = Any amino acid
  VARIANT 46: note = Any amino acid
  VARIANT 47: note = Any amino acid
  VARIANT 48: note = Any amino acid
  VARIANT 49: note = Any amino acid
GXXXXXXXXXXXXXXXXXXXXXXXXXXXXXXGXXXXXXXSGXXXXXXXXQ

SEQ ID NO: 797367 - protein, 53 aa, unidentified
  VARIANT 2: note = Any amino acid
  VARIANT 3: note = Any amino acid
  VARIANT 4: note = Any amino acid
  VARIANT 5: note = Any amino acid
  VARIANT 6: note = Any amino acid
  VARIANT 7: note = Any amino acid
  VARIANT 8: note = Any amino acid
  VARIANT 9: note = Any amino acid
  VARIANT 10: note = Any amino acid
  VARIANT 11: note = Any amino acid
  VARIANT 12: note = Any amino acid
  VARIANT 13: note = Any amino acid
  VARIANT 14: note = Any amino acid
  VARIANT 15: note = Any amino acid
  VARIANT 16: note = Any amino acid
  VARIANT 17: note = Any amino acid
  VARIANT 18: note = Any amino acid
  VARIANT 19: note = Any amino acid
  VARIANT 20: note = Any amino acid
  VARIANT 21: note = Any amino acid
  VARIANT 22: note = Any amino acid
  VARIANT 23: note = Any amino acid
  VARIANT 24: note = Any amino acid
  VARIANT 25: note = Any amino acid
  VARIANT 26: note = Any amino acid
  VARIANT 27: note = Any amino acid
  VARIANT 28: note = Any amino acid
  VARIANT 29: note = Any amino acid
  VARIANT 30: note = Any amino acid
  VARIANT 31: note = Any amino acid
  VARIANT 33: note = Any amino acid
  VARIANT 34: note = Any amino acid
  VARIANT 35: note = Any amino acid
  VARIANT 36: note = Any amino acid
  VARIANT 37: note = Any amino acid
  VARIANT 38: note = Any amino acid
  VARIANT 39: note = Any amino acid
  VARIANT 42: note = Any amino acid
  VARIANT 43: note = Any amino acid
  VARIANT 44: note = Any amino acid
  VARIANT 45: note = Any amino acid
  VARIANT 46: note = Any amino acid
  VARIANT 47: note = Any amino acid
  VARIANT 48: note = Any amino acid
  VARIANT 49: note = Any amino acid
  VARIANT 50: note = Any amino acid
  VARIANT 51: note = Any amino acid
  VARIANT 52: note = Any amino acid
GXXXXXXXXXXXXXXXXXXXXXXXXXXXXXXGXXXXXXXSGXXXXXXXXXXXQ

SEQ ID NO: 797368 - protein, 53 aa, unidentified
  VARIANT 2: note = Any amino acid
  VARIANT 3: note = Any amino acid
  VARIANT 4: note = Any amino acid
  VARIANT 5: note = Any amino acid
  VARIANT 6: note = Any amino acid
  VARIANT 7: note = Any amino acid
  VARIANT 8: note = Any amino acid
  VARIANT 9: note = Any amino acid
  VARIANT 10: note = Any amino acid
  VARIANT 11: note = Any amino acid
  VARIANT 12: note = Any amino acid
  VARIANT 13: note = Any amino acid
  VARIANT 14: note = Any amino acid
  VARIANT 15: note = Any amino acid
  VARIANT 16: note = Any amino acid
  VARIANT 17: note = Any amino acid
  VARIANT 18: note = Any amino acid
  VARIANT 19: note = Any amino acid
  VARIANT 20: note = Any amino acid
  VARIANT 21: note = Any amino acid
  VARIANT 22: note = Any amino acid
  VARIANT 23: note = Any amino acid
  VARIANT 24: note = Any amino acid
  VARIANT 25: note = Any amino acid
  VARIANT 26: note = Any amino acid
  VARIANT 27: note = Any amino acid
  VARIANT 28: note = Any amino acid
  VARIANT 29: note = Any amino acid
  VARIANT 30: note = Any amino acid
  VARIANT 31: note = Any amino acid
  VARIANT 33: note = Any amino acid
  VARIANT 34: note = Any amino acid
  VARIANT 35: note = Any amino acid
  VARIANT 36: note = Any amino acid
  VARIANT 37: note = Any amino acid
  VARIANT 38: note = Any amino acid
  VARIANT 39: note = Any amino acid
  VARIANT 42: note = Any amino acid
  VARIANT 43: note = Any amino acid
  VARIANT 44: note = Any amino acid
  VARIANT 45: note = Any amino acid
  VARIANT 46: note = Any amino acid
  VARIANT 47: note = Any amino acid
  VARIANT 48: note = Any amino acid
  VARIANT 49: note = Any amino acid
  VARIANT 50: note = Any amino acid
  VARIANT 51: note = Any amino acid
  VARIANT 52: note = Any amino acid
GXXXXXXXXXXXXXXXXXXXXXXXXXXXXXXGXXXXXXXSGXXXXXXXXXXXS

SEQ ID NO: 797369 - protein, 52 aa, unidentified
  VARIANT 2: note = Any amino acid
  VARIANT 3: note = Any amino acid
  VARIANT 4: note = Any amino acid
  VARIANT 5: note = Any amino acid
  VARIANT 6: note = Any amino acid
  VARIANT 7: note = Any amino acid
  VARIANT 8: note = Any amino acid
  VARIANT 9: note = Any amino acid
  VARIANT 10: note = Any amino acid
  VARIANT 11: note = Any amino acid
  VARIANT 12: note = Any amino acid
  VARIANT 13: note = Any amino acid
  VARIANT 14: note = Any amino acid
  VARIANT 15: note = Any amino acid
  VARIANT 16: note = Any amino acid
  VARIANT 17: note = Any amino acid
  VARIANT 18: note = Any amino acid
  VARIANT 19: note = Any amino acid
  VARIANT 20: note = Any amino acid
  VARIANT 21: note = Any amino acid
  VARIANT 22: note = Any amino acid
  VARIANT 23: note = Any amino acid
  VARIANT 24: note = Any amino acid
  VARIANT 25: note = Any amino acid
  VARIANT 26: note = Any amino acid
  VARIANT 27: note = Any amino acid
  VARIANT 28: note = Any amino acid
  VARIANT 29: note = Any amino acid
  VARIANT 30: note = Any amino acid
  VARIANT 31: note = Any amino acid
  VARIANT 33: note = Any amino acid
  VARIANT 34: note = Any amino acid
  VARIANT 35: note = Any amino acid
  VARIANT 36: note = Any amino acid
  VARIANT 37: note = Any amino acid
  VARIANT 38: note = Any amino acid
  VARIANT 39: note = Any amino acid
  VARIANT 42: note = Any amino acid
  VARIANT 43: note = Any amino acid
  VARIANT 44: note = Any amino acid
  VARIANT 45: note = Any amino acid
  VARIANT 46: note = Any amino acid
  VARIANT 47: note = Any amino acid
  VARIANT 48: note = Any amino acid
  VARIANT 49: note = Any amino acid
  VARIANT 50: note = Any amino acid
  VARIANT 51: note = Any amino acid
GXXXXXXXXXXXXXXXXXXXXXXXXXXXXXXRXXXXXXXSAXXXXXXXXXXS

SEQ ID NO: 797370 - protein, 53 aa, unidentified
  VARIANT 2: note = Any amino acid
  VARIANT 3: note = Any amino acid
  VARIANT 4: note = Any amino acid
  VARIANT 5: note = Any amino acid
  VARIANT 6: note = Any amino acid
  VARIANT 7: note = Any amino acid
  VARIANT 8: note = Any amino acid
  VARIANT 9: note = Any amino acid
  VARIANT 10: note = Any amino acid
  VARIANT 11: note = Any amino acid
  VARIANT 12: note = Any amino acid
  VARIANT 13: note = Any amino acid
  VARIANT 14: note = Any amino acid
  VARIANT 15: note = Any amino acid
  VARIANT 16: note = Any amino acid
  VARIANT 17: note = Any amino acid
  VARIANT 18: note = Any amino acid
  VARIANT 19: note = Any amino acid
  VARIANT 20: note = Any amino acid
  VARIANT 21: note = Any amino acid
  VARIANT 22: note = Any amino acid
  VARIANT 23: note = Any amino acid
  VARIANT 24: note = Any amino acid
  VARIANT 25: note = Any amino acid
  VARIANT 26: note = Any amino acid
  VARIANT 27: note = Any amino acid
  VARIANT 28: note = Any amino acid
  VARIANT 29: note = Any amino acid
  VARIANT 30: note = Any amino acid
  VARIANT 31: note = Any amino acid
  VARIANT 33: note = Any amino acid
  VARIANT 34: note = Any amino acid
  VARIANT 35: note = Any amino acid
  VARIANT 36: note = Any amino acid
  VARIANT 37: note = Any amino acid
  VARIANT 38: note = Any amino acid
  VARIANT 39: note = Any amino acid
  VARIANT 42: note = Any amino acid
  VARIANT 43: note = Any amino acid
  VARIANT 44: note = Any amino acid
  VARIANT 45: note = Any amino acid
  VARIANT 46: note = Any amino acid
  VARIANT 47: note = Any amino acid
  VARIANT 48: note = Any amino acid
  VARIANT 49: note = Any amino acid
  VARIANT 50: note = Any amino acid
  VARIANT 51: note = Any amino acid
  VARIANT 52: note = Any amino acid
GXXXXXXXXXXXXXXXXXXXXXXXXXXXXXXRXXXXXXXSGXXXXXXXXXXXT

SEQ ID NO: 797371 - protein, 63 aa, unidentified
  VARIANT 2: note = Any amino acid
  VARIANT 3: note = Any amino acid
  VARIANT 4: note = Any amino acid
  VARIANT 5: note = Any amino acid
  VARIANT 6: note = Any amino acid
  VARIANT 7: note = Any amino acid
  VARIANT 8: note = Any amino acid
  VARIANT 9: note = Any amino acid
  VARIANT 10: note = Any amino acid
  VARIANT 11: note = Any amino acid
  VARIANT 12: note = Any amino acid
  VARIANT 13: note = Any amino acid
  VARIANT 14: note = Any amino acid
  VARIANT 15: note = Any amino acid
  VARIANT 16: note = Any amino acid
  VARIANT 17: note = Any amino acid
  VARIANT 18: note = Any amino acid
  VARIANT 19: note = Any amino acid
  VARIANT 20: note = Any amino acid
  VARIANT 21: note = Any amino acid
  VARIANT 22: note = Any amino acid
  VARIANT 23: note = Any amino acid
  VARIANT 24: note = Any amino acid
  VARIANT 25: note = Any amino acid
  VARIANT 26: note = Any amino acid
  VARIANT 27: note = Any amino acid
  VARIANT 28: note = Any amino acid
  VARIANT 29: note = Any amino acid
  VARIANT 30: note = Any amino acid
  VARIANT 31: note = Any amino acid
  VARIANT 32: note = Any amino acid
  VARIANT 33: note = Any amino acid
  VARIANT 34: note = Any amino acid
  VARIANT 35: note = Any amino acid
  VARIANT 36: note = Any amino acid
  VARIANT 37: note = Any amino acid
  VARIANT 38: note = Any amino acid
  VARIANT 39: note = Any amino acid
  VARIANT 40: note = Any amino acid
  VARIANT 42: note = Any amino acid
  VARIANT 43: note = Any amino acid
  VARIANT 44: note = Any amino acid
  VARIANT 45: note = Any amino acid
  VARIANT 46: note = Any amino acid
  VARIANT 47: note = Any amino acid
  VARIANT 48: note = Any amino acid
  VARIANT 51: note = Any amino acid
  VARIANT 52: note = Any amino acid
  VARIANT 53: note = Any amino acid
  VARIANT 54: note = Any amino acid
  VARIANT 55: note = Any amino acid
  VARIANT 56: note = Any amino acid
  VARIANT 57: note = Any amino acid
  VARIANT 58: note = Any amino acid
  VARIANT 59: note = Any amino acid
  VARIANT 60: note = Any amino acid
  VARIANT 61: note = Any amino acid
  VARIANT 62: note = Any amino acid
GXXXXXXXXXXXXXXXXXXXXXXXXXXXXXXXXXXXXXXXGXXXXXXXSGXXXXXXXXXXXXG

SEQ ID NO: 797372 - protein, 53 aa, unidentified
  VARIANT 2: note = Any amino acid
  VARIANT 3: note = Any amino acid
  VARIANT 4: note = Any amino acid
  VARIANT 5: note = Any amino acid
  VARIANT 6: note = Any amino acid
  VARIANT 7: note = Any amino acid
  VARIANT 8: note = Any amino acid
  VARIANT 9: note = Any amino acid
  VARIANT 10: note = Any amino acid
  VARIANT 11: note = Any amino acid
  VARIANT 12: note = Any amino acid
  VARIANT 13: note = Any amino acid
  VARIANT 14: note = Any amino acid
  VARIANT 15: note = Any amino acid
  VARIANT 16: note = Any amino acid
  VARIANT 17: note = Any amino acid
  VARIANT 18: note = Any amino acid
  VARIANT 19: note = Any amino acid
  VARIANT 20: note = Any amino acid
  VARIANT 21: note = Any amino acid
  VARIANT 22: note = Any amino acid
  VARIANT 23: note = Any amino acid
  VARIANT 24: note = Any amino acid
  VARIANT 25: note = Any amino acid
  VARIANT 26: note = Any amino acid
  VARIANT 27: note = Any amino acid
  VARIANT 28: note = Any amino acid
  VARIANT 29: note = Any amino acid
  VARIANT 30: note = Any amino acid
  VARIANT 31: note = Any amino acid
  VARIANT 33: note = Any amino acid
  VARIANT 34: note = Any amino acid
  VARIANT 35: note = Any amino acid
  VARIANT 36: note = Any amino acid
  VARIANT 37: note = Any amino acid
  VARIANT 38: note = Any amino acid
  VARIANT 39: note = Any amino acid
  VARIANT 42: note = Any amino acid
  VARIANT 43: note = Any amino acid
  VARIANT 44: note = Any amino acid
  VARIANT 45: note = Any amino acid
  VARIANT 46: note = Any amino acid
  VARIANT 47: note = Any amino acid
  VARIANT 48: note = Any amino acid
  VARIANT 49: note = Any amino acid
  VARIANT 50: note = Any amino acid
  VARIANT 51: note = Any amino acid
  VARIANT 52: note = Any amino acid
SXXXXXXXXXXXXXXXXXXXXXXXXXXXXXXNXXXXXXXTGXXXXXXXXXXXK

SEQ ID NO: 797373 - protein, 54 aa, unidentified
  VARIANT 2: note = Any amino acid
  VARIANT 3: note = Any amino acid
  VARIANT 4: note = Any amino acid
  VARIANT 5: note = Any amino acid
  VARIANT 6: note = Any amino acid
  VARIANT 7: note = Any amino acid
  VARIANT 8: note = Any amino acid
  VARIANT 9: note = Any amino acid
  VARIANT 10: note = Any amino acid
  VARIANT 11: note = Any amino acid
  VARIANT 12: note = Any amino acid
  VARIANT 13: note = Any amino acid
  VARIANT 14: note = Any amino acid
  VARIANT 15: note = Any amino acid
  VARIANT 16: note = Any amino acid
  VARIANT 17: note = Any amino acid
  VARIANT 18: note = Any amino acid
  VARIANT 19: note = Any amino acid
  VARIANT 20: note = Any amino acid
  VARIANT 21: note = Any amino acid
  VARIANT 22: note = Any amino acid
  VARIANT 23: note = Any amino acid
  VARIANT 24: note = Any amino acid
  VARIANT 25: note = Any amino acid
  VARIANT 26: note = Any amino acid
  VARIANT 27: note = Any amino acid
  VARIANT 28: note = Any amino acid
  VARIANT 29: note = Any amino acid
  VARIANT 30: note = Any amino acid
  VARIANT 31: note = Any amino acid
  VARIANT 33: note = Any amino acid
  VARIANT 34: note = Any amino acid
  VARIANT 35: note = Any amino acid
  VARIANT 36: note = Any amino acid
  VARIANT 37: note = Any amino acid
  VARIANT 38: note = Any amino acid
  VARIANT 39: note = Any amino acid
  VARIANT 42: note = Any amino acid
  VARIANT 43: note = Any amino acid
  VARIANT 44: note = Any amino acid
  VARIANT 45: note = Any amino acid
  VARIANT 46: note = Any amino acid
  VARIANT 47: note = Any amino acid
  VARIANT 48: note = Any amino acid
  VARIANT 49: note = Any amino acid
  VARIANT 50: note = Any amino acid
  VARIANT 51: note = Any amino acid
  VARIANT 52: note = Any amino acid
  VARIANT 53: note = Any amino acid
AXXXXXXXXXXXXXXXXXXXXXXXXXXXXXXTXXXXXXXSGXXXXXXXXXXXXA

SEQ ID NO: 797374 - protein, 50 aa, unidentified
  VARIANT 2: note = Any amino acid
  VARIANT 3: note = Any amino acid
  VARIANT 4: note = Any amino acid
  VARIANT 5: note = Any amino acid
  VARIANT 6: note = Any amino acid
  VARIANT 7: note = Any amino acid
  VARIANT 8: note = Any amino acid
  VARIANT 9: note = Any amino acid
  VARIANT 10: note = Any amino acid
  VARIANT 11: note = Any amino acid
  VARIANT 12: note = Any amino acid
  VARIANT 13: note = Any amino acid
  VARIANT 14: note = Any amino acid
  VARIANT 15: note = Any amino acid
  VARIANT 16: note = Any amino acid
  VARIANT 17: note = Any amino acid
  VARIANT 18: note = Any amino acid
  VARIANT 19: note = Any amino acid
  VARIANT 20: note = Any amino acid
  VARIANT 21: note = Any amino acid
  VARIANT 22: note = Any amino acid
  VARIANT 23: note = Any amino acid
  VARIANT 24: note = Any amino acid
  VARIANT 25: note = Any amino acid
  VARIANT 26: note = Any amino acid
  VARIANT 27: note = Any amino acid
  VARIANT 28: note = Any amino acid
  VARIANT 29: note = Any amino acid
  VARIANT 30: note = Any amino acid
  VARIANT 31: note = Any amino acid
  VARIANT 33: note = Any amino acid
  VARIANT 34: note = Any amino acid
  VARIANT 35: note = Any amino acid
  VARIANT 36: note = Any amino acid
  VARIANT 37: note = Any amino acid
  VARIANT 38: note = Any amino acid
  VARIANT 39: note = Any amino acid
  VARIANT 42: note = Any amino acid
  VARIANT 43: note = Any amino acid
  VARIANT 44: note = Any amino acid
  VARIANT 45: note = Any amino acid
  VARIANT 46: note = Any amino acid
  VARIANT 47: note = Any amino acid
  VARIANT 48: note = Any amino acid
  VARIANT 49: note = Any amino acid
CXXXXXXXXXXXXXXXXXXXXXXXXXXXXXXAXXXXXXXSGXXXXXXXXY

SEQ ID NO: 797375 - protein, 50 aa, unidentified
  VARIANT 2: note = Any amino acid
  VARIANT 3: note = Any amino acid
  VARIANT 4: note = Any amino acid
  VARIANT 5: note = Any amino acid
  VARIANT 6: note = Any amino acid
  VARIANT 7: note = Any amino acid
  VARIANT 8: note = Any amino acid
  VARIANT 9: note = Any amino acid
  VARIANT 10: note = Any amino acid
  VARIANT 11: note = Any amino acid
  VARIANT 12: note = Any amino acid
  VARIANT 13: note = Any amino acid
  VARIANT 14: note = Any amino acid
  VARIANT 15: note = Any amino acid
  VARIANT 16: note = Any amino acid
  VARIANT 17: note = Any amino acid
  VARIANT 18: note = Any amino acid
  VARIANT 19: note = Any amino acid
  VARIANT 20: note = Any amino acid
  VARIANT 21: note = Any amino acid
  VARIANT 22: note = Any amino acid
  VARIANT 23: note = Any amino acid
  VARIANT 24: note = Any amino acid
  VARIANT 25: note = Any amino acid
  VARIANT 26: note = Any amino acid
  VARIANT 27: note = Any amino acid
  VARIANT 28: note = Any amino acid
  VARIANT 29: note = Any amino acid
  VARIANT 31: note = Any amino acid
  VARIANT 32: note = Any amino acid
  VARIANT 33: note = Any amino acid
  VARIANT 34: note = Any amino acid
  VARIANT 35: note = Any amino acid
  VARIANT 36: note = Any amino acid
  VARIANT 37: note = Any amino acid
  VARIANT 40: note = Any amino acid
  VARIANT 41: note = Any amino acid
  VARIANT 42: note = Any amino acid
  VARIANT 43: note = Any amino acid
  VARIANT 44: note = Any amino acid
  VARIANT 45: note = Any amino acid
  VARIANT 46: note = Any amino acid
  VARIANT 47: note = Any amino acid
  VARIANT 48: note = Any amino acid
  VARIANT 49: note = Any amino acid
DXXXXXXXXXXXXXXXXXXXXXXXXXXXXGXXXXXXXSGXXXXXXXXXXG

SEQ ID NO: 797376 - protein, 51 aa, unidentified
  VARIANT 2: note = Any amino acid
  VARIANT 3: note = Any amino acid
  VARIANT 4: note = Any amino acid
  VARIANT 5: note = Any amino acid
  VARIANT 6: note = Any amino acid
  VARIANT 7: note = Any amino acid
  VARIANT 8: note = Any amino acid
  VARIANT 9: note = Any amino acid
  VARIANT 10: note = Any amino acid
  VARIANT 11: note = Any amino acid
  VARIANT 12: note = Any amino acid
  VARIANT 13: note = Any amino acid
  VARIANT 14: note = Any amino acid
  VARIANT 15: note = Any amino acid
  VARIANT 16: note = Any amino acid
  VARIANT 17: note = Any amino acid
  VARIANT 18: note = Any amino acid
  VARIANT 19: note = Any amino acid
  VARIANT 20: note = Any amino acid
  VARIANT 21: note = Any amino acid
  VARIANT 22: note = Any amino acid
  VARIANT 23: note = Any amino acid
  VARIANT 24: note = Any amino acid
  VARIANT 25: note = Any amino acid
  VARIANT 26: note = Any amino acid
  VARIANT 27: note = Any amino acid
  VARIANT 28: note = Any amino acid
  VARIANT 29: note = Any amino acid
  VARIANT 31: note = Any amino acid
  VARIANT 32: note = Any amino acid
  VARIANT 33: note = Any amino acid
  VARIANT 34: note = Any amino acid
  VARIANT 35: note = Any amino acid
  VARIANT 36: note = Any amino acid
  VARIANT 37: note = Any amino acid
  VARIANT 40: note = Any amino acid
  VARIANT 41: note = Any amino acid
  VARIANT 42: note = Any amino acid
  VARIANT 43: note = Any amino acid
  VARIANT 44: note = Any amino acid
  VARIANT 45: note = Any amino acid
  VARIANT 46: note = Any amino acid
  VARIANT 47: note = Any amino acid
  VARIANT 48: note = Any amino acid
  VARIANT 49: note = Any amino acid
  VARIANT 50: note = Any amino acid
GXXXXXXXXXXXXXXXXXXXXXXXXXXXXGXXXXXXXSGXXXXXXXXXXXA

SEQ ID NO: 797377 - protein, 52 aa, unidentified
  VARIANT 2: note = Any amino acid
  VARIANT 3: note = Any amino acid
  VARIANT 4: note = Any amino acid
  VARIANT 5: note = Any amino acid
  VARIANT 6: note = Any amino acid
  VARIANT 7: note = Any amino acid
  VARIANT 8: note = Any amino acid
  VARIANT 9: note = Any amino acid
  VARIANT 10: note = Any amino acid
  VARIANT 11: note = Any amino acid
  VARIANT 12: note = Any amino acid
  VARIANT 13: note = Any amino acid
  VARIANT 14: note = Any amino acid
  VARIANT 15: note = Any amino acid
  VARIANT 16: note = Any amino acid
  VARIANT 17: note = Any amino acid
  VARIANT 18: note = Any amino acid
  VARIANT 19: note = Any amino acid
  VARIANT 20: note = Any amino acid
  VARIANT 21: note = Any amino acid
  VARIANT 22: note = Any amino acid
  VARIANT 23: note = Any amino acid
  VARIANT 24: note = Any amino acid
  VARIANT 25: note = Any amino acid
  VARIANT 26: note = Any amino acid
  VARIANT 27: note = Any amino acid
  VARIANT 28: note = Any amino acid
  VARIANT 29: note = Any amino acid
  VARIANT 31: note = Any amino acid
  VARIANT 32: note = Any amino acid
  VARIANT 33: note = Any amino acid
  VARIANT 34: note = Any amino acid
  VARIANT 35: note = Any amino acid
  VARIANT 36: note = Any amino acid
  VARIANT 37: note = Any amino acid
  VARIANT 40: note = Any amino acid
  VARIANT 41: note = Any amino acid
  VARIANT 42: note = Any amino acid
  VARIANT 43: note = Any amino acid
  VARIANT 44: note = Any amino acid
  VARIANT 45: note = Any amino acid
  VARIANT 46: note = Any amino acid
  VARIANT 47: note = Any amino acid
  VARIANT 48: note = Any amino acid
  VARIANT 49: note = Any amino acid
  VARIANT 50: note = Any amino acid
  VARIANT 51: note = Any amino acid
GXXXXXXXXXXXXXXXXXXXXXXXXXXXXGXXXXXXXSGXXXXXXXXXXXXA

SEQ ID NO: 797378 - protein, 52 aa, unidentified
  VARIANT 2: note = Any amino acid
  VARIANT 3: note = Any amino acid
  VARIANT 4: note = Any amino acid
  VARIANT 5: note = Any amino acid
  VARIANT 6: note = Any amino acid
  VARIANT 7: note = Any amino acid
  VARIANT 8: note = Any amino acid
  VARIANT 9: note = Any amino acid
  VARIANT 10: note = Any amino acid
  VARIANT 11: note = Any amino acid
  VARIANT 12: note = Any amino acid
  VARIANT 13: note = Any amino acid
  VARIANT 14: note = Any amino acid
  VARIANT 15: note = Any amino acid
  VARIANT 16: note = Any amino acid
  VARIANT 17: note = Any amino acid
  VARIANT 18: note = Any amino acid
  VARIANT 19: note = Any amino acid
  VARIANT 20: note = Any amino acid
  VARIANT 21: note = Any amino acid
  VARIANT 22: note = Any amino acid
  VARIANT 23: note = Any amino acid
  VARIANT 24: note = Any amino acid
  VARIANT 25: note = Any amino acid
  VARIANT 26: note = Any amino acid
  VARIANT 27: note = Any amino acid
  VARIANT 28: note = Any amino acid
  VARIANT 29: note = Any amino acid
  VARIANT 30: note = Any amino acid
  VARIANT 32: note = Any amino acid
  VARIANT 33: note = Any amino acid
  VARIANT 34: note = Any amino acid
  VARIANT 35: note = Any amino acid
  VARIANT 36: note = Any amino acid
  VARIANT 37: note = Any amino acid
  VARIANT 38: note = Any amino acid
  VARIANT 41: note = Any amino acid
  VARIANT 42: note = Any amino acid
  VARIANT 43: note = Any amino acid
  VARIANT 44: note = Any amino acid
  VARIANT 45: note = Any amino acid
  VARIANT 46: note = Any amino acid
  VARIANT 47: note = Any amino acid
  VARIANT 48: note = Any amino acid
  VARIANT 49: note = Any amino acid
  VARIANT 50: note = Any amino acid
  VARIANT 51: note = Any amino acid
GXXXXXXXXXXXXXXXXXXXXXXXXXXXXXGXXXXXXXSDXXXXXXXXXXXC

SEQ ID NO: 797379 - protein, 51 aa, unidentified
  VARIANT 2: note = Any amino acid
  VARIANT 3: note = Any amino acid
  VARIANT 4: note = Any amino acid
  VARIANT 5: note = Any amino acid
  VARIANT 6: note = Any amino acid
  VARIANT 7: note = Any amino acid
  VARIANT 8: note = Any amino acid
  VARIANT 9: note = Any amino acid
  VARIANT 10: note = Any amino acid
  VARIANT 11: note = Any amino acid
  VARIANT 12: note = Any amino acid
  VARIANT 13: note = Any amino acid
  VARIANT 14: note = Any amino acid
  VARIANT 15: note = Any amino acid
  VARIANT 16: note = Any amino acid
  VARIANT 17: note = Any amino acid
  VARIANT 18: note = Any amino acid
  VARIANT 19: note = Any amino acid
  VARIANT 20: note = Any amino acid
  VARIANT 21: note = Any amino acid
  VARIANT 22: note = Any amino acid
  VARIANT 23: note = Any amino acid
  VARIANT 24: note = Any amino acid
  VARIANT 25: note = Any amino acid
  VARIANT 26: note = Any amino acid
  VARIANT 27: note = Any amino acid
  VARIANT 28: note = Any amino acid
  VARIANT 29: note = Any amino acid
  VARIANT 30: note = Any amino acid
  VARIANT 32: note = Any amino acid
  VARIANT 33: note = Any amino acid
  VARIANT 34: note = Any amino acid
  VARIANT 35: note = Any amino acid
  VARIANT 36: note = Any amino acid
  VARIANT 37: note = Any amino acid
  VARIANT 38: note = Any amino acid
  VARIANT 41: note = Any amino acid
  VARIANT 42: note = Any amino acid
  VARIANT 43: note = Any amino acid
  VARIANT 44: note = Any amino acid
  VARIANT 45: note = Any amino acid
  VARIANT 46: note = Any amino acid
  VARIANT 47: note = Any amino acid
  VARIANT 48: note = Any amino acid
  VARIANT 49: note = Any amino acid
  VARIANT 50: note = Any amino acid
GXXXXXXXXXXXXXXXXXXXXXXXXXXXXXGXXXXXXXSGXXXXXXXXXXS

SEQ ID NO: 797380 - protein, 51 aa, unidentified
  VARIANT 2: note = Any amino acid
  VARIANT 3: note = Any amino acid
  VARIANT 4: note = Any amino acid
  VARIANT 5: note = Any amino acid
  VARIANT 6: note = Any amino acid
  VARIANT 7: note = Any amino acid
  VARIANT 8: note = Any amino acid
  VARIANT 9: note = Any amino acid
  VARIANT 10: note = Any amino acid
  VARIANT 11: note = Any amino acid
  VARIANT 12: note = Any amino acid
  VARIANT 13: note = Any amino acid
  VARIANT 14: note = Any amino acid
  VARIANT 15: note = Any amino acid
  VARIANT 16: note = Any amino acid
  VARIANT 17: note = Any amino acid
  VARIANT 18: note = Any amino acid
  VARIANT 19: note = Any amino acid
  VARIANT 20: note = Any amino acid
  VARIANT 21: note = Any amino acid
  VARIANT 22: note = Any amino acid
  VARIANT 23: note = Any amino acid
  VARIANT 24: note = Any amino acid
  VARIANT 25: note = Any amino acid
  VARIANT 26: note = Any amino acid
  VARIANT 27: note = Any amino acid
  VARIANT 28: note = Any amino acid
  VARIANT 29: note = Any amino acid
  VARIANT 30: note = Any amino acid
  VARIANT 32: note = Any amino acid
  VARIANT 33: note = Any amino acid
  VARIANT 34: note = Any amino acid
  VARIANT 35: note = Any amino acid
  VARIANT 36: note = Any amino acid
  VARIANT 37: note = Any amino acid
  VARIANT 38: note = Any amino acid
  VARIANT 41: note = Any amino acid
  VARIANT 42: note = Any amino acid
  VARIANT 43: note = Any amino acid
  VARIANT 44: note = Any amino acid
  VARIANT 45: note = Any amino acid
  VARIANT 46: note = Any amino acid
  VARIANT 47: note = Any amino acid
  VARIANT 48: note = Any amino acid
  VARIANT 49: note = Any amino acid
  VARIANT 50: note = Any amino acid
GXXXXXXXXXXXXXXXXXXXXXXXXXXXXXGXXXXXXXSGXXXXXXXXXXY

SEQ ID NO: 797381 - protein, 52 aa, unidentified
  VARIANT 2: note = Any amino acid
  VARIANT 3: note = Any amino acid
  VARIANT 4: note = Any amino acid
  VARIANT 5: note = Any amino acid
  VARIANT 6: note = Any amino acid
  VARIANT 7: note = Any amino acid
  VARIANT 8: note = Any amino acid
  VARIANT 9: note = Any amino acid
  VARIANT 10: note = Any amino acid
  VARIANT 11: note = Any amino acid
  VARIANT 12: note = Any amino acid
  VARIANT 13: note = Any amino acid
  VARIANT 14: note = Any amino acid
  VARIANT 15: note = Any amino acid
  VARIANT 16: note = Any amino acid
  VARIANT 17: note = Any amino acid
  VARIANT 18: note = Any amino acid
  VARIANT 19: note = Any amino acid
  VARIANT 20: note = Any amino acid
  VARIANT 21: note = Any amino acid
  VARIANT 22: note = Any amino acid
  VARIANT 23: note = Any amino acid
  VARIANT 24: note = Any amino acid
  VARIANT 25: note = Any amino acid
  VARIANT 26: note = Any amino acid
  VARIANT 27: note = Any amino acid
  VARIANT 28: note = Any amino acid
  VARIANT 29: note = Any amino acid
  VARIANT 30: note = Any amino acid
  VARIANT 31: note = Any amino acid
  VARIANT 33: note = Any amino acid
  VARIANT 34: note = Any amino acid
  VARIANT 35: note = Any amino acid
  VARIANT 36: note = Any amino acid
  VARIANT 37: note = Any amino acid
  VARIANT 38: note = Any amino acid
  VARIANT 39: note = Any amino acid
  VARIANT 42: note = Any amino acid
  VARIANT 43: note = Any amino acid
  VARIANT 44: note = Any amino acid
  VARIANT 45: note = Any amino acid
  VARIANT 46: note = Any amino acid
  VARIANT 47: note = Any amino acid
  VARIANT 48: note = Any amino acid
  VARIANT 49: note = Any amino acid
  VARIANT 50: note = Any amino acid
  VARIANT 51: note = Any amino acid
GXXXXXXXXXXXXXXXXXXXXXXXXXXXXXXCXXXXXXXTGXXXXXXXXXXG

SEQ ID NO: 797382 - protein, 53 aa, unidentified
  VARIANT 2: note = Any amino acid
  VARIANT 3: note = Any amino acid
  VARIANT 4: note = Any amino acid
  VARIANT 5: note = Any amino acid
  VARIANT 6: note = Any amino acid
  VARIANT 7: note = Any amino acid
  VARIANT 8: note = Any amino acid
  VARIANT 9: note = Any amino acid
  VARIANT 10: note = Any amino acid
  VARIANT 11: note = Any amino acid
  VARIANT 12: note = Any amino acid
  VARIANT 13: note = Any amino acid
  VARIANT 14: note = Any amino acid
  VARIANT 15: note = Any amino acid
  VARIANT 16: note = Any amino acid
  VARIANT 17: note = Any amino acid
  VARIANT 18: note = Any amino acid
  VARIANT 19: note = Any amino acid
  VARIANT 20: note = Any amino acid
  VARIANT 21: note = Any amino acid
  VARIANT 22: note = Any amino acid
  VARIANT 23: note = Any amino acid
  VARIANT 24: note = Any amino acid
  VARIANT 25: note = Any amino acid
  VARIANT 26: note = Any amino acid
  VARIANT 27: note = Any amino acid
  VARIANT 28: note = Any amino acid
  VARIANT 29: note = Any amino acid
  VARIANT 30: note = Any amino acid
  VARIANT 31: note = Any amino acid
  VARIANT 33: note = Any amino acid
  VARIANT 34: note = Any amino acid
  VARIANT 35: note = Any amino acid
  VARIANT 36: note = Any amino acid
  VARIANT 37: note = Any amino acid
  VARIANT 38: note = Any amino acid
  VARIANT 39: note = Any amino acid
  VARIANT 42: note = Any amino acid
  VARIANT 43: note = Any amino acid
  VARIANT 44: note = Any amino acid
  VARIANT 45: note = Any amino acid
  VARIANT 46: note = Any amino acid
  VARIANT 47: note = Any amino acid
  VARIANT 48: note = Any amino acid
  VARIANT 49: note = Any amino acid
  VARIANT 50: note = Any amino acid
  VARIANT 51: note = Any amino acid
  VARIANT 52: note = Any amino acid
GXXXXXXXXXXXXXXXXXXXXXXXXXXXXXXGXXXXXXXTGXXXXXXXXXXXH

SEQ ID NO: 797383 - protein, 53 aa, unidentified
  VARIANT 2: note = Any amino acid
  VARIANT 3: note = Any amino acid
  VARIANT 4: note = Any amino acid
  VARIANT 5: note = Any amino acid
  VARIANT 6: note = Any amino acid
  VARIANT 7: note = Any amino acid
  VARIANT 8: note = Any amino acid
  VARIANT 9: note = Any amino acid
  VARIANT 10: note = Any amino acid
  VARIANT 11: note = Any amino acid
  VARIANT 12: note = Any amino acid
  VARIANT 13: note = Any amino acid
  VARIANT 14: note = Any amino acid
  VARIANT 15: note = Any amino acid
  VARIANT 16: note = Any amino acid
  VARIANT 17: note = Any amino acid
  VARIANT 18: note = Any amino acid
  VARIANT 19: note = Any amino acid
  VARIANT 20: note = Any amino acid
  VARIANT 21: note = Any amino acid
  VARIANT 22: note = Any amino acid
  VARIANT 23: note = Any amino acid
  VARIANT 24: note = Any amino acid
  VARIANT 25: note = Any amino acid
  VARIANT 26: note = Any amino acid
  VARIANT 27: note = Any amino acid
  VARIANT 28: note = Any amino acid
  VARIANT 29: note = Any amino acid
  VARIANT 30: note = Any amino acid
  VARIANT 31: note = Any amino acid
  VARIANT 32: note = Any amino acid
  VARIANT 34: note = Any amino acid
  VARIANT 35: note = Any amino acid
  VARIANT 36: note = Any amino acid
  VARIANT 37: note = Any amino acid
  VARIANT 38: note = Any amino acid
  VARIANT 39: note = Any amino acid
  VARIANT 40: note = Any amino acid
  VARIANT 43: note = Any amino acid
  VARIANT 44: note = Any amino acid
  VARIANT 45: note = Any amino acid
  VARIANT 46: note = Any amino acid
  VARIANT 47: note = Any amino acid
  VARIANT 48: note = Any amino acid
  VARIANT 49: note = Any amino acid
  VARIANT 50: note = Any amino acid
  VARIANT 51: note = Any amino acid
  VARIANT 52: note = Any amino acid
GXXXXXXXXXXXXXXXXXXXXXXXXXXXXXXXAXXXXXXXSAXXXXXXXXXXG

SEQ ID NO: 797384 - protein, 53 aa, unidentified
  VARIANT 2: note = Any amino acid
  VARIANT 3: note = Any amino acid
  VARIANT 4: note = Any amino acid
  VARIANT 5: note = Any amino acid
  VARIANT 6: note = Any amino acid
  VARIANT 7: note = Any amino acid
  VARIANT 8: note = Any amino acid
  VARIANT 9: note = Any amino acid
  VARIANT 10: note = Any amino acid
  VARIANT 11: note = Any amino acid
  VARIANT 12: note = Any amino acid
  VARIANT 13: note = Any amino acid
  VARIANT 14: note = Any amino acid
  VARIANT 15: note = Any amino acid
  VARIANT 16: note = Any amino acid
  VARIANT 17: note = Any amino acid
  VARIANT 18: note = Any amino acid
  VARIANT 19: note = Any amino acid
  VARIANT 20: note = Any amino acid
  VARIANT 21: note = Any amino acid
  VARIANT 22: note = Any amino acid
  VARIANT 23: note = Any amino acid
  VARIANT 24: note = Any amino acid
  VARIANT 25: note = Any amino acid
  VARIANT 26: note = Any amino acid
  VARIANT 27: note = Any amino acid
  VARIANT 28: note = Any amino acid
  VARIANT 29: note = Any amino acid
  VARIANT 30: note = Any amino acid
  VARIANT 31: note = Any amino acid
  VARIANT 32: note = Any amino acid
  VARIANT 34: note = Any amino acid
  VARIANT 35: note = Any amino acid
  VARIANT 36: note = Any amino acid
  VARIANT 37: note = Any amino acid
  VARIANT 38: note = Any amino acid
  VARIANT 39: note = Any amino acid
  VARIANT 40: note = Any amino acid
  VARIANT 43: note = Any amino acid
  VARIANT 44: note = Any amino acid
  VARIANT 45: note = Any amino acid
  VARIANT 46: note = Any amino acid
  VARIANT 47: note = Any amino acid
  VARIANT 48: note = Any amino acid
  VARIANT 49: note = Any amino acid
  VARIANT 50: note = Any amino acid
  VARIANT 51: note = Any amino acid
  VARIANT 52: note = Any amino acid
GXXXXXXXXXXXXXXXXXXXXXXXXXXXXXXXKXXXXXXXSGXXXXXXXXXXG

SEQ ID NO: 797385 - protein, 52 aa, unidentified
  VARIANT 2: note = Any amino acid
  VARIANT 3: note = Any amino acid
  VARIANT 4: note = Any amino acid
  VARIANT 5: note = Any amino acid
  VARIANT 6: note = Any amino acid
  VARIANT 7: note = Any amino acid
  VARIANT 8: note = Any amino acid
  VARIANT 9: note = Any amino acid
  VARIANT 10: note = Any amino acid
  VARIANT 11: note = Any amino acid
  VARIANT 12: note = Any amino acid
  VARIANT 13: note = Any amino acid
  VARIANT 14: note = Any amino acid
  VARIANT 15: note = Any amino acid
  VARIANT 16: note = Any amino acid
  VARIANT 17: note = Any amino acid
  VARIANT 18: note = Any amino acid
  VARIANT 19: note = Any amino acid
  VARIANT 20: note = Any amino acid
  VARIANT 21: note = Any amino acid
  VARIANT 22: note = Any amino acid
  VARIANT 23: note = Any amino acid
  VARIANT 24: note = Any amino acid
  VARIANT 25: note = Any amino acid
  VARIANT 26: note = Any amino acid
  VARIANT 27: note = Any amino acid
  VARIANT 28: note = Any amino acid
  VARIANT 29: note = Any amino acid
  VARIANT 30: note = Any amino acid
  VARIANT 32: note = Any amino acid
  VARIANT 33: note = Any amino acid
  VARIANT 34: note = Any amino acid
  VARIANT 35: note = Any amino acid
  VARIANT 36: note = Any amino acid
  VARIANT 37: note = Any amino acid
  VARIANT 38: note = Any amino acid
  VARIANT 41: note = Any amino acid
  VARIANT 42: note = Any amino acid
  VARIANT 43: note = Any amino acid
  VARIANT 44: note = Any amino acid
  VARIANT 45: note = Any amino acid
  VARIANT 46: note = Any amino acid
  VARIANT 47: note = Any amino acid
  VARIANT 48: note = Any amino acid
  VARIANT 49: note = Any amino acid
  VARIANT 50: note = Any amino acid
  VARIANT 51: note = Any amino acid
IXXXXXXXXXXXXXXXXXXXXXXXXXXXXXGXXXXXXXSGXXXXXXXXXXXG

SEQ ID NO: 797386 - protein, 52 aa, unidentified
  VARIANT 2: note = Any amino acid
  VARIANT 3: note = Any amino acid
  VARIANT 4: note = Any amino acid
  VARIANT 5: note = Any amino acid
  VARIANT 6: note = Any amino acid
  VARIANT 7: note = Any amino acid
  VARIANT 8: note = Any amino acid
  VARIANT 9: note = Any amino acid
  VARIANT 10: note = Any amino acid
  VARIANT 11: note = Any amino acid
  VARIANT 12: note = Any amino acid
  VARIANT 13: note = Any amino acid
  VARIANT 14: note = Any amino acid
  VARIANT 15: note = Any amino acid
  VARIANT 16: note = Any amino acid
  VARIANT 17: note = Any amino acid
  VARIANT 18: note = Any amino acid
  VARIANT 19: note = Any amino acid
  VARIANT 20: note = Any amino acid
  VARIANT 21: note = Any amino acid
  VARIANT 22: note = Any amino acid
  VARIANT 23: note = Any amino acid
  VARIANT 24: note = Any amino acid
  VARIANT 25: note = Any amino acid
  VARIANT 26: note = Any amino acid
  VARIANT 27: note = Any amino acid
  VARIANT 28: note = Any amino acid
  VARIANT 29: note = Any amino acid
  VARIANT 30: note = Any amino acid
  VARIANT 31: note = Any amino acid
  VARIANT 33: note = Any amino acid
  VARIANT 34: note = Any amino acid
  VARIANT 35: note = Any amino acid
  VARIANT 36: note = Any amino acid
  VARIANT 37: note = Any amino acid
  VARIANT 38: note = Any amino acid
  VARIANT 39: note = Any amino acid
  VARIANT 42: note = Any amino acid
  VARIANT 43: note = Any amino acid
  VARIANT 44: note = Any amino acid
  VARIANT 45: note = Any amino acid
  VARIANT 46: note = Any amino acid
  VARIANT 47: note = Any amino acid
  VARIANT 48: note = Any amino acid
  VARIANT 49: note = Any amino acid
  VARIANT 50: note = Any amino acid
  VARIANT 51: note = Any amino acid
SXXXXXXXXXXXXXXXXXXXXXXXXXXXXXXRXXXXXXXSGXXXXXXXXXXG

SEQ ID NO: 797387 - protein, 52 aa, unidentified
  VARIANT 2: note = Any amino acid
  VARIANT 3: note = Any amino acid
  VARIANT 4: note = Any amino acid
  VARIANT 5: note = Any amino acid
  VARIANT 6: note = Any amino acid
  VARIANT 7: note = Any amino acid
  VARIANT 8: note = Any amino acid
  VARIANT 9: note = Any amino acid
  VARIANT 10: note = Any amino acid
  VARIANT 11: note = Any amino acid
  VARIANT 12: note = Any amino acid
  VARIANT 13: note = Any amino acid
  VARIANT 14: note = Any amino acid
  VARIANT 15: note = Any amino acid
  VARIANT 16: note = Any amino acid
  VARIANT 17: note = Any amino acid
  VARIANT 18: note = Any amino acid
  VARIANT 19: note = Any amino acid
  VARIANT 20: note = Any amino acid
  VARIANT 21: note = Any amino acid
  VARIANT 22: note = Any amino acid
  VARIANT 23: note = Any amino acid
  VARIANT 24: note = Any amino acid
  VARIANT 25: note = Any amino acid
  VARIANT 26: note = Any amino acid
  VARIANT 27: note = Any amino acid
  VARIANT 28: note = Any amino acid
  VARIANT 29: note = Any amino acid
  VARIANT 30: note = Any amino acid
  VARIANT 31: note = Any amino acid
  VARIANT 33: note = Any amino acid
  VARIANT 34: note = Any amino acid
  VARIANT 35: note = Any amino acid
  VARIANT 36: note = Any amino acid
  VARIANT 37: note = Any amino acid
  VARIANT 38: note = Any amino acid
  VARIANT 39: note = Any amino acid
  VARIANT 42: note = Any amino acid
  VARIANT 43: note = Any amino acid
  VARIANT 44: note = Any amino acid
  VARIANT 45: note = Any amino acid
  VARIANT 46: note = Any amino acid
  VARIANT 47: note = Any amino acid
  VARIANT 48: note = Any amino acid
  VARIANT 49: note = Any amino acid
  VARIANT 50: note = Any amino acid
  VARIANT 51: note = Any amino acid
VXXXXXXXXXXXXXXXXXXXXXXXXXXXXXXGXXXXXXXSAXXXXXXXXXXG

SEQ ID NO: 797388 - protein, 53 aa, unidentified
  VARIANT 2: note = Any amino acid
  VARIANT 3: note = Any amino acid
  VARIANT 4: note = Any amino acid
  VARIANT 5: note = Any amino acid
  VARIANT 6: note = Any amino acid
  VARIANT 7: note = Any amino acid
  VARIANT 8: note = Any amino acid
  VARIANT 9: note = Any amino acid
  VARIANT 10: note = Any amino acid
  VARIANT 11: note = Any amino acid
  VARIANT 12: note = Any amino acid
  VARIANT 13: note = Any amino acid
  VARIANT 14: note = Any amino acid
  VARIANT 15: note = Any amino acid
  VARIANT 16: note = Any amino acid
  VARIANT 17: note = Any amino acid
  VARIANT 18: note = Any amino acid
  VARIANT 19: note = Any amino acid
  VARIANT 20: note = Any amino acid
  VARIANT 21: note = Any amino acid
  VARIANT 22: note = Any amino acid
  VARIANT 23: note = Any amino acid
  VARIANT 24: note = Any amino acid
  VARIANT 25: note = Any amino acid
  VARIANT 26: note = Any amino acid
  VARIANT 27: note = Any amino acid
  VARIANT 28: note = Any amino acid
  VARIANT 29: note = Any amino acid
  VARIANT 30: note = Any amino acid
  VARIANT 31: note = Any amino acid
  VARIANT 33: note = Any amino acid
  VARIANT 34: note = Any amino acid
  VARIANT 35: note = Any amino acid
  VARIANT 36: note = Any amino acid
  VARIANT 37: note = Any amino acid
  VARIANT 38: note = Any amino acid
  VARIANT 39: note = Any amino acid
  VARIANT 42: note = Any amino acid
  VARIANT 43: note = Any amino acid
  VARIANT 44: note = Any amino acid
  VARIANT 45: note = Any amino acid
  VARIANT 46: note = Any amino acid
  VARIANT 47: note = Any amino acid
  VARIANT 48: note = Any amino acid
  VARIANT 49: note = Any amino acid
  VARIANT 50: note = Any amino acid
  VARIANT 51: note = Any amino acid
  VARIANT 52: note = Any amino acid
CXXXXXXXXXXXXXXXXXXXXXXXXXXXXXXGXXXXXXXSGXXXXXXXXXXXG

SEQ ID NO: 797389 - protein, 50 aa, unidentified
  VARIANT 2: note = Any amino acid
  VARIANT 3: note = Any amino acid
  VARIANT 4: note = Any amino acid
  VARIANT 5: note = Any amino acid
  VARIANT 6: note = Any amino acid
  VARIANT 7: note = Any amino acid
  VARIANT 8: note = Any amino acid
  VARIANT 9: note = Any amino acid
  VARIANT 10: note = Any amino acid
  VARIANT 11: note = Any amino acid
  VARIANT 12: note = Any amino acid
  VARIANT 13: note = Any amino acid
  VARIANT 14: note = Any amino acid
  VARIANT 15: note = Any amino acid
  VARIANT 16: note = Any amino acid
  VARIANT 17: note = Any amino acid
  VARIANT 18: note = Any amino acid
  VARIANT 19: note = Any amino acid
  VARIANT 20: note = Any amino acid
  VARIANT 21: note = Any amino acid
  VARIANT 22: note = Any amino acid
  VARIANT 23: note = Any amino acid
  VARIANT 24: note = Any amino acid
  VARIANT 25: note = Any amino acid
  VARIANT 26: note = Any amino acid
  VARIANT 27: note = Any amino acid
  VARIANT 28: note = Any amino acid
  VARIANT 29: note = Any amino acid
  VARIANT 31: note = Any amino acid
  VARIANT 32: note = Any amino acid
  VARIANT 33: note = Any amino acid
  VARIANT 34: note = Any amino acid
  VARIANT 35: note = Any amino acid
  VARIANT 36: note = Any amino acid
  VARIANT 37: note = Any amino acid
  VARIANT 40: note = Any amino acid
  VARIANT 41: note = Any amino acid
  VARIANT 42: note = Any amino acid
  VARIANT 43: note = Any amino acid
  VARIANT 44: note = Any amino acid
  VARIANT 45: note = Any amino acid
  VARIANT 46: note = Any amino acid
  VARIANT 47: note = Any amino acid
  VARIANT 48: note = Any amino acid
  VARIANT 49: note = Any amino acid
GXXXXXXXXXXXXXXXXXXXXXXXXXXXXDXXXXXXXSGXXXXXXXXXXG

SEQ ID NO: 797390 - protein, 53 aa, unidentified
  VARIANT 2: note = Any amino acid
  VARIANT 3: note = Any amino acid
  VARIANT 4: note = Any amino acid
  VARIANT 5: note = Any amino acid
  VARIANT 6: note = Any amino acid
  VARIANT 7: note = Any amino acid
  VARIANT 8: note = Any amino acid
  VARIANT 9: note = Any amino acid
  VARIANT 10: note = Any amino acid
  VARIANT 11: note = Any amino acid
  VARIANT 12: note = Any amino acid
  VARIANT 13: note = Any amino acid
  VARIANT 14: note = Any amino acid
  VARIANT 15: note = Any amino acid
  VARIANT 16: note = Any amino acid
  VARIANT 17: note = Any amino acid
  VARIANT 18: note = Any amino acid
  VARIANT 19: note = Any amino acid
  VARIANT 20: note = Any amino acid
  VARIANT 21: note = Any amino acid
  VARIANT 22: note = Any amino acid
  VARIANT 23: note = Any amino acid
  VARIANT 24: note = Any amino acid
  VARIANT 25: note = Any amino acid
  VARIANT 26: note = Any amino acid
  VARIANT 27: note = Any amino acid
  VARIANT 28: note = Any amino acid
  VARIANT 29: note = Any amino acid
  VARIANT 30: note = Any amino acid
  VARIANT 32: note = Any amino acid
  VARIANT 33: note = Any amino acid
  VARIANT 34: note = Any amino acid
  VARIANT 35: note = Any amino acid
  VARIANT 36: note = Any amino acid
  VARIANT 37: note = Any amino acid
  VARIANT 38: note = Any amino acid
  VARIANT 41: note = Any amino acid
  VARIANT 42: note = Any amino acid
  VARIANT 43: note = Any amino acid
  VARIANT 44: note = Any amino acid
  VARIANT 45: note = Any amino acid
  VARIANT 46: note = Any amino acid
  VARIANT 47: note = Any amino acid
  VARIANT 48: note = Any amino acid
  VARIANT 49: note = Any amino acid
  VARIANT 50: note = Any amino acid
  VARIANT 51: note = Any amino acid
  VARIANT 52: note = Any amino acid
GXXXXXXXXXXXXXXXXXXXXXXXXXXXXXDXXXXXXXSGXXXXXXXXXXXXG

SEQ ID NO: 797391 - protein, 54 aa, unidentified
  VARIANT 2: note = Any amino acid
  VARIANT 3: note = Any amino acid
  VARIANT 4: note = Any amino acid
  VARIANT 5: note = Any amino acid
  VARIANT 6: note = Any amino acid
  VARIANT 7: note = Any amino acid
  VARIANT 8: note = Any amino acid
  VARIANT 9: note = Any amino acid
  VARIANT 10: note = Any amino acid
  VARIANT 11: note = Any amino acid
  VARIANT 12: note = Any amino acid
  VARIANT 13: note = Any amino acid
  VARIANT 14: note = Any amino acid
  VARIANT 15: note = Any amino acid
  VARIANT 16: note = Any amino acid
  VARIANT 17: note = Any amino acid
  VARIANT 18: note = Any amino acid
  VARIANT 19: note = Any amino acid
  VARIANT 20: note = Any amino acid
  VARIANT 21: note = Any amino acid
  VARIANT 22: note = Any amino acid
  VARIANT 23: note = Any amino acid
  VARIANT 24: note = Any amino acid
  VARIANT 25: note = Any amino acid
  VARIANT 26: note = Any amino acid
  VARIANT 27: note = Any amino acid
  VARIANT 28: note = Any amino acid
  VARIANT 29: note = Any amino acid
  VARIANT 30: note = Any amino acid
  VARIANT 32: note = Any amino acid
  VARIANT 33: note = Any amino acid
  VARIANT 34: note = Any amino acid
  VARIANT 35: note = Any amino acid
  VARIANT 36: note = Any amino acid
  VARIANT 37: note = Any amino acid
  VARIANT 38: note = Any amino acid
  VARIANT 39: note = Any amino acid
  VARIANT 42: note = Any amino acid
  VARIANT 43: note = Any amino acid
  VARIANT 44: note = Any amino acid
  VARIANT 45: note = Any amino acid
  VARIANT 46: note = Any amino acid
  VARIANT 47: note = Any amino acid
  VARIANT 48: note = Any amino acid
  VARIANT 49: note = Any amino acid
  VARIANT 50: note = Any amino acid
  VARIANT 51: note = Any amino acid
  VARIANT 52: note = Any amino acid
  VARIANT 53: note = Any amino acid
GXXXXXXXXXXXXXXXXXXXXXXXXXXXXXGXXXXXXXXSGXXXXXXXXXXXXA

SEQ ID NO: 797392 - protein, 52 aa, unidentified
  VARIANT 2: note = Any amino acid
  VARIANT 3: note = Any amino acid
  VARIANT 4: note = Any amino acid
  VARIANT 5: note = Any amino acid
  VARIANT 6: note = Any amino acid
  VARIANT 7: note = Any amino acid
  VARIANT 8: note = Any amino acid
  VARIANT 9: note = Any amino acid
  VARIANT 10: note = Any amino acid
  VARIANT 11: note = Any amino acid
  VARIANT 12: note = Any amino acid
  VARIANT 13: note = Any amino acid
  VARIANT 14: note = Any amino acid
  VARIANT 15: note = Any amino acid
  VARIANT 16: note = Any amino acid
  VARIANT 17: note = Any amino acid
  VARIANT 18: note = Any amino acid
  VARIANT 19: note = Any amino acid
  VARIANT 20: note = Any amino acid
  VARIANT 21: note = Any amino acid
  VARIANT 22: note = Any amino acid
  VARIANT 23: note = Any amino acid
  VARIANT 24: note = Any amino acid
  VARIANT 25: note = Any amino acid
  VARIANT 26: note = Any amino acid
  VARIANT 27: note = Any amino acid
  VARIANT 28: note = Any amino acid
  VARIANT 29: note = Any amino acid
  VARIANT 30: note = Any amino acid
  VARIANT 31: note = Any amino acid
  VARIANT 33: note = Any amino acid
  VARIANT 34: note = Any amino acid
  VARIANT 35: note = Any amino acid
  VARIANT 36: note = Any amino acid
  VARIANT 37: note = Any amino acid
  VARIANT 38: note = Any amino acid
  VARIANT 39: note = Any amino acid
  VARIANT 42: note = Any amino acid
  VARIANT 43: note = Any amino acid
  VARIANT 44: note = Any amino acid
  VARIANT 45: note = Any amino acid
  VARIANT 46: note = Any amino acid
  VARIANT 47: note = Any amino acid
  VARIANT 48: note = Any amino acid
  VARIANT 49: note = Any amino acid
  VARIANT 50: note = Any amino acid
  VARIANT 51: note = Any amino acid
GXXXXXXXXXXXXXXXXXXXXXXXXXXXXXXAXXXXXXXSAXXXXXXXXXXA

SEQ ID NO: 797393 - protein, 52 aa, unidentified
  VARIANT 2: note = Any amino acid
  VARIANT 3: note = Any amino acid
  VARIANT 4: note = Any amino acid
  VARIANT 5: note = Any amino acid
  VARIANT 6: note = Any amino acid
  VARIANT 7: note = Any amino acid
  VARIANT 8: note = Any amino acid
  VARIANT 9: note = Any amino acid
  VARIANT 10: note = Any amino acid
  VARIANT 11: note = Any amino acid
  VARIANT 12: note = Any amino acid
  VARIANT 13: note = Any amino acid
  VARIANT 14: note = Any amino acid
  VARIANT 15: note = Any amino acid
  VARIANT 16: note = Any amino acid
  VARIANT 17: note = Any amino acid
  VARIANT 18: note = Any amino acid
  VARIANT 19: note = Any amino acid
  VARIANT 20: note = Any amino acid
  VARIANT 21: note = Any amino acid
  VARIANT 22: note = Any amino acid
  VARIANT 23: note = Any amino acid
  VARIANT 24: note = Any amino acid
  VARIANT 25: note = Any amino acid
  VARIANT 26: note = Any amino acid
  VARIANT 27: note = Any amino acid
  VARIANT 28: note = Any amino acid
  VARIANT 29: note = Any amino acid
  VARIANT 30: note = Any amino acid
  VARIANT 31: note = Any amino acid
  VARIANT 33: note = Any amino acid
  VARIANT 34: note = Any amino acid
  VARIANT 35: note = Any amino acid
  VARIANT 36: note = Any amino acid
  VARIANT 37: note = Any amino acid
  VARIANT 38: note = Any amino acid
  VARIANT 39: note = Any amino acid
  VARIANT 42: note = Any amino acid
  VARIANT 43: note = Any amino acid
  VARIANT 44: note = Any amino acid
  VARIANT 45: note = Any amino acid
  VARIANT 46: note = Any amino acid
  VARIANT 47: note = Any amino acid
  VARIANT 48: note = Any amino acid
  VARIANT 49: note = Any amino acid
  VARIANT 50: note = Any amino acid
  VARIANT 51: note = Any amino acid
GXXXXXXXXXXXXXXXXXXXXXXXXXXXXXXGXXXXXXXSVXXXXXXXXXXG

SEQ ID NO: 797394 - protein, 52 aa, unidentified
  VARIANT 2: note = Any amino acid
  VARIANT 3: note = Any amino acid
  VARIANT 4: note = Any amino acid
  VARIANT 5: note = Any amino acid
  VARIANT 6: note = Any amino acid
  VARIANT 7: note = Any amino acid
  VARIANT 8: note = Any amino acid
  VARIANT 9: note = Any amino acid
  VARIANT 10: note = Any amino acid
  VARIANT 11: note = Any amino acid
  VARIANT 12: note = Any amino acid
  VARIANT 13: note = Any amino acid
  VARIANT 14: note = Any amino acid
  VARIANT 15: note = Any amino acid
  VARIANT 16: note = Any amino acid
  VARIANT 17: note = Any amino acid
  VARIANT 18: note = Any amino acid
  VARIANT 19: note = Any amino acid
  VARIANT 20: note = Any amino acid
  VARIANT 21: note = Any amino acid
  VARIANT 22: note = Any amino acid
  VARIANT 23: note = Any amino acid
  VARIANT 24: note = Any amino acid
  VARIANT 25: note = Any amino acid
  VARIANT 26: note = Any amino acid
  VARIANT 27: note = Any amino acid
  VARIANT 28: note = Any amino acid
  VARIANT 29: note = Any amino acid
  VARIANT 30: note = Any amino acid
  VARIANT 31: note = Any amino acid
  VARIANT 33: note = Any amino acid
  VARIANT 34: note = Any amino acid
  VARIANT 35: note = Any amino acid
  VARIANT 36: note = Any amino acid
  VARIANT 37: note = Any amino acid
  VARIANT 38: note = Any amino acid
  VARIANT 39: note = Any amino acid
  VARIANT 42: note = Any amino acid
  VARIANT 43: note = Any amino acid
  VARIANT 44: note = Any amino acid
  VARIANT 45: note = Any amino acid
  VARIANT 46: note = Any amino acid
  VARIANT 47: note = Any amino acid
  VARIANT 48: note = Any amino acid
  VARIANT 49: note = Any amino acid
  VARIANT 50: note = Any amino acid
  VARIANT 51: note = Any amino acid
GXXXXXXXXXXXXXXXXXXXXXXXXXXXXXXGXXXXXXXTGXXXXXXXXXXI

SEQ ID NO: 797395 - protein, 52 aa, unidentified
  VARIANT 2: note = Any amino acid
  VARIANT 3: note = Any amino acid
  VARIANT 4: note = Any amino acid
  VARIANT 5: note = Any amino acid
  VARIANT 6: note = Any amino acid
  VARIANT 7: note = Any amino acid
  VARIANT 8: note = Any amino acid
  VARIANT 9: note = Any amino acid
  VARIANT 10: note = Any amino acid
  VARIANT 11: note = Any amino acid
  VARIANT 12: note = Any amino acid
  VARIANT 13: note = Any amino acid
  VARIANT 14: note = Any amino acid
  VARIANT 15: note = Any amino acid
  VARIANT 16: note = Any amino acid
  VARIANT 17: note = Any amino acid
  VARIANT 18: note = Any amino acid
  VARIANT 19: note = Any amino acid
  VARIANT 20: note = Any amino acid
  VARIANT 21: note = Any amino acid
  VARIANT 22: note = Any amino acid
  VARIANT 23: note = Any amino acid
  VARIANT 24: note = Any amino acid
  VARIANT 25: note = Any amino acid
  VARIANT 26: note = Any amino acid
  VARIANT 27: note = Any amino acid
  VARIANT 28: note = Any amino acid
  VARIANT 29: note = Any amino acid
  VARIANT 30: note = Any amino acid
  VARIANT 31: note = Any amino acid
  VARIANT 33: note = Any amino acid
  VARIANT 34: note = Any amino acid
  VARIANT 35: note = Any amino acid
  VARIANT 36: note = Any amino acid
  VARIANT 37: note = Any amino acid
  VARIANT 38: note = Any amino acid
  VARIANT 39: note = Any amino acid
  VARIANT 42: note = Any amino acid
  VARIANT 43: note = Any amino acid
  VARIANT 44: note = Any amino acid
  VARIANT 45: note = Any amino acid
  VARIANT 46: note = Any amino acid
  VARIANT 47: note = Any amino acid
  VARIANT 48: note = Any amino acid
  VARIANT 49: note = Any amino acid
  VARIANT 50: note = Any amino acid
  VARIANT 51: note = Any amino acid
GXXXXXXXXXXXXXXXXXXXXXXXXXXXXXXKXXXXXXXSGXXXXXXXXXXT

SEQ ID NO: 797396 - protein, 53 aa, unidentified
  VARIANT 2: note = Any amino acid
  VARIANT 3: note = Any amino acid
  VARIANT 4: note = Any amino acid
  VARIANT 5: note = Any amino acid
  VARIANT 6: note = Any amino acid
  VARIANT 7: note = Any amino acid
  VARIANT 8: note = Any amino acid
  VARIANT 9: note = Any amino acid
  VARIANT 10: note = Any amino acid
  VARIANT 11: note = Any amino acid
  VARIANT 12: note = Any amino acid
  VARIANT 13: note = Any amino acid
  VARIANT 14: note = Any amino acid
  VARIANT 15: note = Any amino acid
  VARIANT 16: note = Any amino acid
  VARIANT 17: note = Any amino acid
  VARIANT 18: note = Any amino acid
  VARIANT 19: note = Any amino acid
  VARIANT 20: note = Any amino acid
  VARIANT 21: note = Any amino acid
  VARIANT 22: note = Any amino acid
  VARIANT 23: note = Any amino acid
  VARIANT 24: note = Any amino acid
  VARIANT 25: note = Any amino acid
  VARIANT 26: note = Any amino acid
  VARIANT 27: note = Any amino acid
  VARIANT 28: note = Any amino acid
  VARIANT 29: note = Any amino acid
  VARIANT 30: note = Any amino acid
  VARIANT 31: note = Any amino acid
  VARIANT 33: note = Any amino acid
  VARIANT 34: note = Any amino acid
  VARIANT 35: note = Any amino acid
  VARIANT 36: note = Any amino acid
  VARIANT 37: note = Any amino acid
  VARIANT 38: note = Any amino acid
  VARIANT 39: note = Any amino acid
  VARIANT 42: note = Any amino acid
  VARIANT 43: note = Any amino acid
  VARIANT 44: note = Any amino acid
  VARIANT 45: note = Any amino acid
  VARIANT 46: note = Any amino acid
  VARIANT 47: note = Any amino acid
  VARIANT 48: note = Any amino acid
  VARIANT 49: note = Any amino acid
  VARIANT 50: note = Any amino acid
  VARIANT 51: note = Any amino acid
  VARIANT 52: note = Any amino acid
GXXXXXXXXXXXXXXXXXXXXXXXXXXXXXXNXXXXXXXSGXXXXXXXXXXXT

SEQ ID NO: 797397 - protein, 52 aa, unidentified
  VARIANT 2: note = Any amino acid
  VARIANT 3: note = Any amino acid
  VARIANT 4: note = Any amino acid
  VARIANT 5: note = Any amino acid
  VARIANT 6: note = Any amino acid
  VARIANT 7: note = Any amino acid
  VARIANT 8: note = Any amino acid
  VARIANT 9: note = Any amino acid
  VARIANT 10: note = Any amino acid
  VARIANT 11: note = Any amino acid
  VARIANT 12: note = Any amino acid
  VARIANT 13: note = Any amino acid
  VARIANT 14: note = Any amino acid
  VARIANT 15: note = Any amino acid
  VARIANT 16: note = Any amino acid
  VARIANT 17: note = Any amino acid
  VARIANT 18: note = Any amino acid
  VARIANT 19: note = Any amino acid
  VARIANT 20: note = Any amino acid
  VARIANT 21: note = Any amino acid
  VARIANT 22: note = Any amino acid
  VARIANT 23: note = Any amino acid
  VARIANT 24: note = Any amino acid
  VARIANT 25: note = Any amino acid
  VARIANT 26: note = Any amino acid
  VARIANT 27: note = Any amino acid
  VARIANT 28: note = Any amino acid
  VARIANT 29: note = Any amino acid
  VARIANT 30: note = Any amino acid
  VARIANT 31: note = Any amino acid
  VARIANT 33: note = Any amino acid
  VARIANT 34: note = Any amino acid
  VARIANT 35: note = Any amino acid
  VARIANT 36: note = Any amino acid
  VARIANT 37: note = Any amino acid
  VARIANT 38: note = Any amino acid
  VARIANT 39: note = Any amino acid
  VARIANT 42: note = Any amino acid
  VARIANT 43: note = Any amino acid
  VARIANT 44: note = Any amino acid
  VARIANT 45: note = Any amino acid
  VARIANT 46: note = Any amino acid
  VARIANT 47: note = Any amino acid
  VARIANT 48: note = Any amino acid
  VARIANT 49: note = Any amino acid
  VARIANT 50: note = Any amino acid
  VARIANT 51: note = Any amino acid
GXXXXXXXXXXXXXXXXXXXXXXXXXXXXXXSXXXXXXXSGXXXXXXXXXXN

SEQ ID NO: 797398 - protein, 56 aa, unidentified
  VARIANT 2: note = Any amino acid
  VARIANT 3: note = Any amino acid
  VARIANT 4: note = Any amino acid
  VARIANT 5: note = Any amino acid
  VARIANT 6: note = Any amino acid
  VARIANT 7: note = Any amino acid
  VARIANT 8: note = Any amino acid
  VARIANT 9: note = Any amino acid
  VARIANT 10: note = Any amino acid
  VARIANT 11: note = Any amino acid
  VARIANT 12: note = Any amino acid
  VARIANT 13: note = Any amino acid
  VARIANT 14: note = Any amino acid
  VARIANT 15: note = Any amino acid
  VARIANT 16: note = Any amino acid
  VARIANT 17: note = Any amino acid
  VARIANT 18: note = Any amino acid
  VARIANT 19: note = Any amino acid
  VARIANT 20: note = Any amino acid
  VARIANT 21: note = Any amino acid
  VARIANT 22: note = Any amino acid
  VARIANT 23: note = Any amino acid
  VARIANT 24: note = Any amino acid
  VARIANT 25: note = Any amino acid
  VARIANT 26: note = Any amino acid
  VARIANT 27: note = Any amino acid
  VARIANT 28: note = Any amino acid
  VARIANT 29: note = Any amino acid
  VARIANT 30: note = Any amino acid
  VARIANT 31: note = Any amino acid
  VARIANT 32: note = Any amino acid
  VARIANT 34: note = Any amino acid
  VARIANT 35: note = Any amino acid
  VARIANT 36: note = Any amino acid
  VARIANT 37: note = Any amino acid
  VARIANT 38: note = Any amino acid
  VARIANT 39: note = Any amino acid
  VARIANT 40: note = Any amino acid
  VARIANT 43: note = Any amino acid
  VARIANT 44: note = Any amino acid
  VARIANT 45: note = Any amino acid
  VARIANT 46: note = Any amino acid
  VARIANT 47: note = Any amino acid
  VARIANT 48: note = Any amino acid
  VARIANT 49: note = Any amino acid
  VARIANT 50: note = Any amino acid
  VARIANT 51: note = Any amino acid
  VARIANT 52: note = Any amino acid
  VARIANT 53: note = Any amino acid
  VARIANT 54: note = Any amino acid
  VARIANT 55: note = Any amino acid
GXXXXXXXXXXXXXXXXXXXXXXXXXXXXXXXGXXXXXXXSGXXXXXXXXXXXXXC

SEQ ID NO: 797399 - protein, 52 aa, unidentified
  VARIANT 2: note = Any amino acid
  VARIANT 3: note = Any amino acid
  VARIANT 4: note = Any amino acid
  VARIANT 5: note = Any amino acid
  VARIANT 6: note = Any amino acid
  VARIANT 7: note = Any amino acid
  VARIANT 8: note = Any amino acid
  VARIANT 9: note = Any amino acid
  VARIANT 10: note = Any amino acid
  VARIANT 11: note = Any amino acid
  VARIANT 12: note = Any amino acid
  VARIANT 13: note = Any amino acid
  VARIANT 14: note = Any amino acid
  VARIANT 15: note = Any amino acid
  VARIANT 16: note = Any amino acid
  VARIANT 17: note = Any amino acid
  VARIANT 18: note = Any amino acid
  VARIANT 19: note = Any amino acid
  VARIANT 20: note = Any amino acid
  VARIANT 21: note = Any amino acid
  VARIANT 22: note = Any amino acid
  VARIANT 23: note = Any amino acid
  VARIANT 24: note = Any amino acid
  VARIANT 25: note = Any amino acid
  VARIANT 26: note = Any amino acid
  VARIANT 27: note = Any amino acid
  VARIANT 28: note = Any amino acid
  VARIANT 29: note = Any amino acid
  VARIANT 30: note = Any amino acid
  VARIANT 32: note = Any amino acid
  VARIANT 33: note = Any amino acid
  VARIANT 34: note = Any amino acid
  VARIANT 35: note = Any amino acid
  VARIANT 36: note = Any amino acid
  VARIANT 37: note = Any amino acid
  VARIANT 38: note = Any amino acid
  VARIANT 41: note = Any amino acid
  VARIANT 42: note = Any amino acid
  VARIANT 43: note = Any amino acid
  VARIANT 44: note = Any amino acid
  VARIANT 45: note = Any amino acid
  VARIANT 46: note = Any amino acid
  VARIANT 47: note = Any amino acid
  VARIANT 48: note = Any amino acid
  VARIANT 49: note = Any amino acid
  VARIANT 50: note = Any amino acid
  VARIANT 51: note = Any amino acid
QXXXXXXXXXXXXXXXXXXXXXXXXXXXXXGXXXXXXXSGXXXXXXXXXXXG

SEQ ID NO: 797400 - protein, 53 aa, unidentified
  VARIANT 2: note = Any amino acid
  VARIANT 3: note = Any amino acid
  VARIANT 4: note = Any amino acid
  VARIANT 5: note = Any amino acid
  VARIANT 6: note = Any amino acid
  VARIANT 7: note = Any amino acid
  VARIANT 8: note = Any amino acid
  VARIANT 9: note = Any amino acid
  VARIANT 10: note = Any amino acid
  VARIANT 11: note = Any amino acid
  VARIANT 12: note = Any amino acid
  VARIANT 13: note = Any amino acid
  VARIANT 14: note = Any amino acid
  VARIANT 15: note = Any amino acid
  VARIANT 16: note = Any amino acid
  VARIANT 17: note = Any amino acid
  VARIANT 18: note = Any amino acid
  VARIANT 19: note = Any amino acid
  VARIANT 20: note = Any amino acid
  VARIANT 21: note = Any amino acid
  VARIANT 22: note = Any amino acid
  VARIANT 23: note = Any amino acid
  VARIANT 24: note = Any amino acid
  VARIANT 25: note = Any amino acid
  VARIANT 26: note = Any amino acid
  VARIANT 27: note = Any amino acid
  VARIANT 28: note = Any amino acid
  VARIANT 29: note = Any amino acid
  VARIANT 30: note = Any amino acid
  VARIANT 32: note = Any amino acid
  VARIANT 33: note = Any amino acid
  VARIANT 34: note = Any amino acid
  VARIANT 35: note = Any amino acid
  VARIANT 36: note = Any amino acid
  VARIANT 37: note = Any amino acid
  VARIANT 38: note = Any amino acid
  VARIANT 41: note = Any amino acid
  VARIANT 42: note = Any amino acid
  VARIANT 43: note = Any amino acid
  VARIANT 44: note = Any amino acid
  VARIANT 45: note = Any amino acid
  VARIANT 46: note = Any amino acid
  VARIANT 47: note = Any amino acid
  VARIANT 48: note = Any amino acid
  VARIANT 49: note = Any amino acid
  VARIANT 50: note = Any amino acid
  VARIANT 51: note = Any amino acid
  VARIANT 52: note = Any amino acid
RXXXXXXXXXXXXXXXXXXXXXXXXXXXXXGXXXXXXXSAXXXXXXXXXXXXG

SEQ ID NO: 797401 - protein, 53 aa, unidentified
  VARIANT 2: note = Any amino acid
  VARIANT 3: note = Any amino acid
  VARIANT 4: note = Any amino acid
  VARIANT 5: note = Any amino acid
  VARIANT 6: note = Any amino acid
  VARIANT 7: note = Any amino acid
  VARIANT 8: note = Any amino acid
  VARIANT 9: note = Any amino acid
  VARIANT 10: note = Any amino acid
  VARIANT 11: note = Any amino acid
  VARIANT 12: note = Any amino acid
  VARIANT 13: note = Any amino acid
  VARIANT 14: note = Any amino acid
  VARIANT 15: note = Any amino acid
  VARIANT 16: note = Any amino acid
  VARIANT 17: note = Any amino acid
  VARIANT 18: note = Any amino acid
  VARIANT 19: note = Any amino acid
  VARIANT 20: note = Any amino acid
  VARIANT 21: note = Any amino acid
  VARIANT 22: note = Any amino acid
  VARIANT 23: note = Any amino acid
  VARIANT 24: note = Any amino acid
  VARIANT 25: note = Any amino acid
  VARIANT 26: note = Any amino acid
  VARIANT 27: note = Any amino acid
  VARIANT 28: note = Any amino acid
  VARIANT 29: note = Any amino acid
  VARIANT 30: note = Any amino acid
  VARIANT 31: note = Any amino acid
  VARIANT 32: note = Any amino acid
  VARIANT 34: note = Any amino acid
  VARIANT 35: note = Any amino acid
  VARIANT 36: note = Any amino acid
  VARIANT 37: note = Any amino acid
  VARIANT 38: note = Any amino acid
  VARIANT 39: note = Any amino acid
  VARIANT 40: note = Any amino acid
  VARIANT 43: note = Any amino acid
  VARIANT 44: note = Any amino acid
  VARIANT 45: note = Any amino acid
  VARIANT 46: note = Any amino acid
  VARIANT 47: note = Any amino acid
  VARIANT 48: note = Any amino acid
  VARIANT 49: note = Any amino acid
  VARIANT 50: note = Any amino acid
  VARIANT 51: note = Any amino acid
  VARIANT 52: note = Any amino acid
RXXXXXXXXXXXXXXXXXXXXXXXXXXXXXXXGXXXXXXXSGXXXXXXXXXXC

SEQ ID NO: 797402 - protein, 53 aa, unidentified
  VARIANT 2: note = Any amino acid
  VARIANT 3: note = Any amino acid
  VARIANT 4: note = Any amino acid
  VARIANT 5: note = Any amino acid
  VARIANT 6: note = Any amino acid
  VARIANT 7: note = Any amino acid
  VARIANT 8: note = Any amino acid
  VARIANT 9: note = Any amino acid
  VARIANT 10: note = Any amino acid
  VARIANT 11: note = Any amino acid
  VARIANT 12: note = Any amino acid
  VARIANT 13: note = Any amino acid
  VARIANT 14: note = Any amino acid
  VARIANT 15: note = Any amino acid
  VARIANT 16: note = Any amino acid
  VARIANT 17: note = Any amino acid
  VARIANT 18: note = Any amino acid
  VARIANT 19: note = Any amino acid
  VARIANT 20: note = Any amino acid
  VARIANT 21: note = Any amino acid
  VARIANT 22: note = Any amino acid
  VARIANT 23: note = Any amino acid
  VARIANT 24: note = Any amino acid
  VARIANT 25: note = Any amino acid
  VARIANT 26: note = Any amino acid
  VARIANT 27: note = Any amino acid
  VARIANT 28: note = Any amino acid
  VARIANT 29: note = Any amino acid
  VARIANT 30: note = Any amino acid
  VARIANT 31: note = Any amino acid
  VARIANT 33: note = Any amino acid
  VARIANT 34: note = Any amino acid
  VARIANT 35: note = Any amino acid
  VARIANT 36: note = Any amino acid
  VARIANT 37: note = Any amino acid
  VARIANT 38: note = Any amino acid
  VARIANT 39: note = Any amino acid
  VARIANT 42: note = Any amino acid
  VARIANT 43: note = Any amino acid
  VARIANT 44: note = Any amino acid
  VARIANT 45: note = Any amino acid
  VARIANT 46: note = Any amino acid
  VARIANT 47: note = Any amino acid
  VARIANT 48: note = Any amino acid
  VARIANT 49: note = Any amino acid
  VARIANT 50: note = Any amino acid
  VARIANT 51: note = Any amino acid
  VARIANT 52: note = Any amino acid
SXXXXXXXXXXXXXXXXXXXXXXXXXXXXXXTXXXXXXXSGXXXXXXXXXXXA

SEQ ID NO: 797403 - protein, 52 aa, unidentified
  VARIANT 2: note = Any amino acid
  VARIANT 3: note = Any amino acid
  VARIANT 4: note = Any amino acid
  VARIANT 5: note = Any amino acid
  VARIANT 6: note = Any amino acid
  VARIANT 7: note = Any amino acid
  VARIANT 8: note = Any amino acid
  VARIANT 9: note = Any amino acid
  VARIANT 10: note = Any amino acid
  VARIANT 11: note = Any amino acid
  VARIANT 12: note = Any amino acid
  VARIANT 13: note = Any amino acid
  VARIANT 14: note = Any amino acid
  VARIANT 15: note = Any amino acid
  VARIANT 16: note = Any amino acid
  VARIANT 17: note = Any amino acid
  VARIANT 18: note = Any amino acid
  VARIANT 19: note = Any amino acid
  VARIANT 20: note = Any amino acid
  VARIANT 21: note = Any amino acid
  VARIANT 22: note = Any amino acid
  VARIANT 23: note = Any amino acid
  VARIANT 24: note = Any amino acid
  VARIANT 25: note = Any amino acid
  VARIANT 26: note = Any amino acid
  VARIANT 27: note = Any amino acid
  VARIANT 28: note = Any amino acid
  VARIANT 29: note = Any amino acid
  VARIANT 30: note = Any amino acid
  VARIANT 32: note = Any amino acid
  VARIANT 33: note = Any amino acid
  VARIANT 34: note = Any amino acid
  VARIANT 35: note = Any amino acid
  VARIANT 36: note = Any amino acid
  VARIANT 37: note = Any amino acid
  VARIANT 38: note = Any amino acid
  VARIANT 41: note = Any amino acid
  VARIANT 42: note = Any amino acid
  VARIANT 43: note = Any amino acid
  VARIANT 44: note = Any amino acid
  VARIANT 45: note = Any amino acid
  VARIANT 46: note = Any amino acid
  VARIANT 47: note = Any amino acid
  VARIANT 48: note = Any amino acid
  VARIANT 49: note = Any amino acid
  VARIANT 50: note = Any amino acid
  VARIANT 51: note = Any amino acid
TXXXXXXXXXXXXXXXXXXXXXXXXXXXXXGXXXXXXXSGXXXXXXXXXXXG

SEQ ID NO: 797404 - protein, 53 aa, unidentified
  VARIANT 2: note = Any amino acid
  VARIANT 3: note = Any amino acid
  VARIANT 4: note = Any amino acid
  VARIANT 5: note = Any amino acid
  VARIANT 6: note = Any amino acid
  VARIANT 7: note = Any amino acid
  VARIANT 8: note = Any amino acid
  VARIANT 9: note = Any amino acid
  VARIANT 10: note = Any amino acid
  VARIANT 11: note = Any amino acid
  VARIANT 12: note = Any amino acid
  VARIANT 13: note = Any amino acid
  VARIANT 14: note = Any amino acid
  VARIANT 15: note = Any amino acid
  VARIANT 16: note = Any amino acid
  VARIANT 17: note = Any amino acid
  VARIANT 18: note = Any amino acid
  VARIANT 19: note = Any amino acid
  VARIANT 20: note = Any amino acid
  VARIANT 21: note = Any amino acid
  VARIANT 22: note = Any amino acid
  VARIANT 23: note = Any amino acid
  VARIANT 24: note = Any amino acid
  VARIANT 25: note = Any amino acid
  VARIANT 26: note = Any amino acid
  VARIANT 27: note = Any amino acid
  VARIANT 28: note = Any amino acid
  VARIANT 29: note = Any amino acid
  VARIANT 30: note = Any amino acid
  VARIANT 31: note = Any amino acid
  VARIANT 33: note = Any amino acid
  VARIANT 34: note = Any amino acid
  VARIANT 35: note = Any amino acid
  VARIANT 36: note = Any amino acid
  VARIANT 37: note = Any amino acid
  VARIANT 38: note = Any amino acid
  VARIANT 39: note = Any amino acid
  VARIANT 42: note = Any amino acid
  VARIANT 43: note = Any amino acid
  VARIANT 44: note = Any amino acid
  VARIANT 45: note = Any amino acid
  VARIANT 46: note = Any amino acid
  VARIANT 47: note = Any amino acid
  VARIANT 48: note = Any amino acid
  VARIANT 49: note = Any amino acid
  VARIANT 50: note = Any amino acid
  VARIANT 51: note = Any amino acid
  VARIANT 52: note = Any amino acid
TXXXXXXXXXXXXXXXXXXXXXXXXXXXXXXGXXXXXXXSGXXXXXXXXXXXI

SEQ ID NO: 797405 - protein, 53 aa, unidentified
  VARIANT 2: note = Any amino acid
  VARIANT 3: note = Any amino acid
  VARIANT 4: note = Any amino acid
  VARIANT 5: note = Any amino acid
  VARIANT 6: note = Any amino acid
  VARIANT 7: note = Any amino acid
  VARIANT 8: note = Any amino acid
  VARIANT 9: note = Any amino acid
  VARIANT 10: note = Any amino acid
  VARIANT 11: note = Any amino acid
  VARIANT 12: note = Any amino acid
  VARIANT 13: note = Any amino acid
  VARIANT 14: note = Any amino acid
  VARIANT 15: note = Any amino acid
  VARIANT 16: note = Any amino acid
  VARIANT 17: note = Any amino acid
  VARIANT 18: note = Any amino acid
  VARIANT 19: note = Any amino acid
  VARIANT 20: note = Any amino acid
  VARIANT 21: note = Any amino acid
  VARIANT 22: note = Any amino acid
  VARIANT 23: note = Any amino acid
  VARIANT 24: note = Any amino acid
  VARIANT 25: note = Any amino acid
  VARIANT 26: note = Any amino acid
  VARIANT 27: note = Any amino acid
  VARIANT 28: note = Any amino acid
  VARIANT 29: note = Any amino acid
  VARIANT 30: note = Any amino acid
  VARIANT 31: note = Any amino acid
  VARIANT 33: note = Any amino acid
  VARIANT 34: note = Any amino acid
  VARIANT 35: note = Any amino acid
  VARIANT 36: note = Any amino acid
  VARIANT 37: note = Any amino acid
  VARIANT 38: note = Any amino acid
  VARIANT 39: note = Any amino acid
  VARIANT 42: note = Any amino acid
  VARIANT 43: note = Any amino acid
  VARIANT 44: note = Any amino acid
  VARIANT 45: note = Any amino acid
  VARIANT 46: note = Any amino acid
  VARIANT 47: note = Any amino acid
  VARIANT 48: note = Any amino acid
  VARIANT 49: note = Any amino acid
  VARIANT 50: note = Any amino acid
  VARIANT 51: note = Any amino acid
  VARIANT 52: note = Any amino acid
AXXXXXXXXXXXXXXXXXXXXXXXXXXXXXXTXXXXXXXTGXXXXXXXXXXXA

SEQ ID NO: 797406 - protein, 52 aa, unidentified
  VARIANT 2: note = Any amino acid
  VARIANT 3: note = Any amino acid
  VARIANT 4: note = Any amino acid
  VARIANT 5: note = Any amino acid
  VARIANT 6: note = Any amino acid
  VARIANT 7: note = Any amino acid
  VARIANT 8: note = Any amino acid
  VARIANT 9: note = Any amino acid
  VARIANT 10: note = Any amino acid
  VARIANT 11: note = Any amino acid
  VARIANT 12: note = Any amino acid
  VARIANT 13: note = Any amino acid
  VARIANT 14: note = Any amino acid
  VARIANT 15: note = Any amino acid
  VARIANT 16: note = Any amino acid
  VARIANT 17: note = Any amino acid
  VARIANT 18: note = Any amino acid
  VARIANT 19: note = Any amino acid
  VARIANT 20: note = Any amino acid
  VARIANT 21: note = Any amino acid
  VARIANT 22: note = Any amino acid
  VARIANT 23: note = Any amino acid
  VARIANT 24: note = Any amino acid
  VARIANT 25: note = Any amino acid
  VARIANT 26: note = Any amino acid
  VARIANT 27: note = Any amino acid
  VARIANT 28: note = Any amino acid
  VARIANT 29: note = Any amino acid
  VARIANT 30: note = Any amino acid
  VARIANT 32: note = Any amino acid
  VARIANT 33: note = Any amino acid
  VARIANT 34: note = Any amino acid
  VARIANT 35: note = Any amino acid
  VARIANT 36: note = Any amino acid
  VARIANT 37: note = Any amino acid
  VARIANT 38: note = Any amino acid
  VARIANT 41: note = Any amino acid
  VARIANT 42: note = Any amino acid
  VARIANT 43: note = Any amino acid
  VARIANT 44: note = Any amino acid
  VARIANT 45: note = Any amino acid
  VARIANT 46: note = Any amino acid
  VARIANT 47: note = Any amino acid
  VARIANT 48: note = Any amino acid
  VARIANT 49: note = Any amino acid
  VARIANT 50: note = Any amino acid
  VARIANT 51: note = Any amino acid
GXXXXXXXXXXXXXXXXXXXXXXXXXXXXXGXXXXXXXPGXXXXXXXXXXXG

SEQ ID NO: 797407 - protein, 53 aa, unidentified
  VARIANT 2: note = Any amino acid
  VARIANT 3: note = Any amino acid
  VARIANT 4: note = Any amino acid
  VARIANT 5: note = Any amino acid
  VARIANT 6: note = Any amino acid
  VARIANT 7: note = Any amino acid
  VARIANT 8: note = Any amino acid
  VARIANT 9: note = Any amino acid
  VARIANT 10: note = Any amino acid
  VARIANT 11: note = Any amino acid
  VARIANT 12: note = Any amino acid
  VARIANT 13: note = Any amino acid
  VARIANT 14: note = Any amino acid
  VARIANT 15: note = Any amino acid
  VARIANT 16: note = Any amino acid
  VARIANT 17: note = Any amino acid
  VARIANT 18: note = Any amino acid
  VARIANT 19: note = Any amino acid
  VARIANT 20: note = Any amino acid
  VARIANT 21: note = Any amino acid
  VARIANT 22: note = Any amino acid
  VARIANT 23: note = Any amino acid
  VARIANT 24: note = Any amino acid
  VARIANT 25: note = Any amino acid
  VARIANT 26: note = Any amino acid
  VARIANT 27: note = Any amino acid
  VARIANT 28: note = Any amino acid
  VARIANT 29: note = Any amino acid
  VARIANT 30: note = Any amino acid
  VARIANT 32: note = Any amino acid
  VARIANT 33: note = Any amino acid
  VARIANT 34: note = Any amino acid
  VARIANT 35: note = Any amino acid
  VARIANT 36: note = Any amino acid
  VARIANT 37: note = Any amino acid
  VARIANT 38: note = Any amino acid
  VARIANT 41: note = Any amino acid
  VARIANT 42: note = Any amino acid
  VARIANT 43: note = Any amino acid
  VARIANT 44: note = Any amino acid
  VARIANT 45: note = Any amino acid
  VARIANT 46: note = Any amino acid
  VARIANT 47: note = Any amino acid
  VARIANT 48: note = Any amino acid
  VARIANT 49: note = Any amino acid
  VARIANT 50: note = Any amino acid
  VARIANT 51: note = Any amino acid
  VARIANT 52: note = Any amino acid
GXXXXXXXXXXXXXXXXXXXXXXXXXXXXXGXXXXXXXPGXXXXXXXXXXXXG

SEQ ID NO: 797408 - protein, 52 aa, unidentified
  VARIANT 2: note = Any amino acid
  VARIANT 3: note = Any amino acid
  VARIANT 4: note = Any amino acid
  VARIANT 5: note = Any amino acid
  VARIANT 6: note = Any amino acid
  VARIANT 7: note = Any amino acid
  VARIANT 8: note = Any amino acid
  VARIANT 9: note = Any amino acid
  VARIANT 10: note = Any amino acid
  VARIANT 11: note = Any amino acid
  VARIANT 12: note = Any amino acid
  VARIANT 13: note = Any amino acid
  VARIANT 14: note = Any amino acid
  VARIANT 15: note = Any amino acid
  VARIANT 16: note = Any amino acid
  VARIANT 17: note = Any amino acid
  VARIANT 18: note = Any amino acid
  VARIANT 19: note = Any amino acid
  VARIANT 20: note = Any amino acid
  VARIANT 21: note = Any amino acid
  VARIANT 22: note = Any amino acid
  VARIANT 23: note = Any amino acid
  VARIANT 24: note = Any amino acid
  VARIANT 25: note = Any amino acid
  VARIANT 26: note = Any amino acid
  VARIANT 27: note = Any amino acid
  VARIANT 28: note = Any amino acid
  VARIANT 29: note = Any amino acid
  VARIANT 30: note = Any amino acid
  VARIANT 32: note = Any amino acid
  VARIANT 33: note = Any amino acid
  VARIANT 34: note = Any amino acid
  VARIANT 35: note = Any amino acid
  VARIANT 36: note = Any amino acid
  VARIANT 37: note = Any amino acid
  VARIANT 38: note = Any amino acid
  VARIANT 41: note = Any amino acid
  VARIANT 42: note = Any amino acid
  VARIANT 43: note = Any amino acid
  VARIANT 44: note = Any amino acid
  VARIANT 45: note = Any amino acid
  VARIANT 46: note = Any amino acid
  VARIANT 47: note = Any amino acid
  VARIANT 48: note = Any amino acid
  VARIANT 49: note = Any amino acid
  VARIANT 50: note = Any amino acid
  VARIANT 51: note = Any amino acid
GXXXXXXXXXXXXXXXXXXXXXXXXXXXXXGXXXXXXXSCXXXXXXXXXXXG

SEQ ID NO: 797409 - protein, 53 aa, unidentified
  VARIANT 2: note = Any amino acid
  VARIANT 3: note = Any amino acid
  VARIANT 4: note = Any amino acid
  VARIANT 5: note = Any amino acid
  VARIANT 6: note = Any amino acid
  VARIANT 7: note = Any amino acid
  VARIANT 8: note = Any amino acid
  VARIANT 9: note = Any amino acid
  VARIANT 10: note = Any amino acid
  VARIANT 11: note = Any amino acid
  VARIANT 12: note = Any amino acid
  VARIANT 13: note = Any amino acid
  VARIANT 14: note = Any amino acid
  VARIANT 15: note = Any amino acid
  VARIANT 16: note = Any amino acid
  VARIANT 17: note = Any amino acid
  VARIANT 18: note = Any amino acid
  VARIANT 19: note = Any amino acid
  VARIANT 20: note = Any amino acid
  VARIANT 21: note = Any amino acid
  VARIANT 22: note = Any amino acid
  VARIANT 23: note = Any amino acid
  VARIANT 24: note = Any amino acid
  VARIANT 25: note = Any amino acid
  VARIANT 26: note = Any amino acid
  VARIANT 27: note = Any amino acid
  VARIANT 28: note = Any amino acid
  VARIANT 29: note = Any amino acid
  VARIANT 30: note = Any amino acid
  VARIANT 32: note = Any amino acid
  VARIANT 33: note = Any amino acid
  VARIANT 34: note = Any amino acid
  VARIANT 35: note = Any amino acid
  VARIANT 36: note = Any amino acid
  VARIANT 37: note = Any amino acid
  VARIANT 38: note = Any amino acid
  VARIANT 41: note = Any amino acid
  VARIANT 42: note = Any amino acid
  VARIANT 43: note = Any amino acid
  VARIANT 44: note = Any amino acid
  VARIANT 45: note = Any amino acid
  VARIANT 46: note = Any amino acid
  VARIANT 47: note = Any amino acid
  VARIANT 48: note = Any amino acid
  VARIANT 49: note = Any amino acid
  VARIANT 50: note = Any amino acid
  VARIANT 51: note = Any amino acid
  VARIANT 52: note = Any amino acid
GXXXXXXXXXXXXXXXXXXXXXXXXXXXXXGXXXXXXXSEXXXXXXXXXXXXG

SEQ ID NO: 797410 - protein, 53 aa, unidentified
  VARIANT 2: note = Any amino acid
  VARIANT 3: note = Any amino acid
  VARIANT 4: note = Any amino acid
  VARIANT 5: note = Any amino acid
  VARIANT 6: note = Any amino acid
  VARIANT 7: note = Any amino acid
  VARIANT 8: note = Any amino acid
  VARIANT 9: note = Any amino acid
  VARIANT 10: note = Any amino acid
  VARIANT 11: note = Any amino acid
  VARIANT 12: note = Any amino acid
  VARIANT 13: note = Any amino acid
  VARIANT 14: note = Any amino acid
  VARIANT 15: note = Any amino acid
  VARIANT 16: note = Any amino acid
  VARIANT 17: note = Any amino acid
  VARIANT 18: note = Any amino acid
  VARIANT 19: note = Any amino acid
  VARIANT 20: note = Any amino acid
  VARIANT 21: note = Any amino acid
  VARIANT 22: note = Any amino acid
  VARIANT 23: note = Any amino acid
  VARIANT 24: note = Any amino acid
  VARIANT 25: note = Any amino acid
  VARIANT 26: note = Any amino acid
  VARIANT 27: note = Any amino acid
  VARIANT 28: note = Any amino acid
  VARIANT 29: note = Any amino acid
  VARIANT 30: note = Any amino acid
  VARIANT 32: note = Any amino acid
  VARIANT 33: note = Any amino acid
  VARIANT 34: note = Any amino acid
  VARIANT 35: note = Any amino acid
  VARIANT 36: note = Any amino acid
  VARIANT 37: note = Any amino acid
  VARIANT 38: note = Any amino acid
  VARIANT 41: note = Any amino acid
  VARIANT 42: note = Any amino acid
  VARIANT 43: note = Any amino acid
  VARIANT 44: note = Any amino acid
  VARIANT 45: note = Any amino acid
  VARIANT 46: note = Any amino acid
  VARIANT 47: note = Any amino acid
  VARIANT 48: note = Any amino acid
  VARIANT 49: note = Any amino acid
  VARIANT 50: note = Any amino acid
  VARIANT 51: note = Any amino acid
  VARIANT 52: note = Any amino acid
GXXXXXXXXXXXXXXXXXXXXXXXXXXXXXGXXXXXXXSGXXXXXXXXXXXXD

SEQ ID NO: 797411 - protein, 53 aa, unidentified
  VARIANT 2: note = Any amino acid
  VARIANT 3: note = Any amino acid
  VARIANT 4: note = Any amino acid
  VARIANT 5: note = Any amino acid
  VARIANT 6: note = Any amino acid
  VARIANT 7: note = Any amino acid
  VARIANT 8: note = Any amino acid
  VARIANT 9: note = Any amino acid
  VARIANT 10: note = Any amino acid
  VARIANT 11: note = Any amino acid
  VARIANT 12: note = Any amino acid
  VARIANT 13: note = Any amino acid
  VARIANT 14: note = Any amino acid
  VARIANT 15: note = Any amino acid
  VARIANT 16: note = Any amino acid
  VARIANT 17: note = Any amino acid
  VARIANT 18: note = Any amino acid
  VARIANT 19: note = Any amino acid
  VARIANT 20: note = Any amino acid
  VARIANT 21: note = Any amino acid
  VARIANT 22: note = Any amino acid
  VARIANT 23: note = Any amino acid
  VARIANT 24: note = Any amino acid
  VARIANT 25: note = Any amino acid
  VARIANT 26: note = Any amino acid
  VARIANT 27: note = Any amino acid
  VARIANT 28: note = Any amino acid
  VARIANT 29: note = Any amino acid
  VARIANT 30: note = Any amino acid
  VARIANT 32: note = Any amino acid
  VARIANT 33: note = Any amino acid
  VARIANT 34: note = Any amino acid
  VARIANT 35: note = Any amino acid
  VARIANT 36: note = Any amino acid
  VARIANT 37: note = Any amino acid
  VARIANT 38: note = Any amino acid
  VARIANT 41: note = Any amino acid
  VARIANT 42: note = Any amino acid
  VARIANT 43: note = Any amino acid
  VARIANT 44: note = Any amino acid
  VARIANT 45: note = Any amino acid
  VARIANT 46: note = Any amino acid
  VARIANT 47: note = Any amino acid
  VARIANT 48: note = Any amino acid
  VARIANT 49: note = Any amino acid
  VARIANT 50: note = Any amino acid
  VARIANT 51: note = Any amino acid
  VARIANT 52: note = Any amino acid
GXXXXXXXXXXXXXXXXXXXXXXXXXXXXXGXXXXXXXSGXXXXXXXXXXXXE

SEQ ID NO: 797412 - protein, 52 aa, unidentified
  VARIANT 2: note = Any amino acid
  VARIANT 3: note = Any amino acid
  VARIANT 4: note = Any amino acid
  VARIANT 5: note = Any amino acid
  VARIANT 6: note = Any amino acid
  VARIANT 7: note = Any amino acid
  VARIANT 8: note = Any amino acid
  VARIANT 9: note = Any amino acid
  VARIANT 10: note = Any amino acid
  VARIANT 11: note = Any amino acid
  VARIANT 12: note = Any amino acid
  VARIANT 13: note = Any amino acid
  VARIANT 14: note = Any amino acid
  VARIANT 15: note = Any amino acid
  VARIANT 16: note = Any amino acid
  VARIANT 17: note = Any amino acid
  VARIANT 18: note = Any amino acid
  VARIANT 19: note = Any amino acid
  VARIANT 20: note = Any amino acid
  VARIANT 21: note = Any amino acid
  VARIANT 22: note = Any amino acid
  VARIANT 23: note = Any amino acid
  VARIANT 24: note = Any amino acid
  VARIANT 25: note = Any amino acid
  VARIANT 26: note = Any amino acid
  VARIANT 27: note = Any amino acid
  VARIANT 28: note = Any amino acid
  VARIANT 29: note = Any amino acid
  VARIANT 30: note = Any amino acid
  VARIANT 32: note = Any amino acid
  VARIANT 33: note = Any amino acid
  VARIANT 34: note = Any amino acid
  VARIANT 35: note = Any amino acid
  VARIANT 36: note = Any amino acid
  VARIANT 37: note = Any amino acid
  VARIANT 38: note = Any amino acid
  VARIANT 41: note = Any amino acid
  VARIANT 42: note = Any amino acid
  VARIANT 43: note = Any amino acid
  VARIANT 44: note = Any amino acid
  VARIANT 45: note = Any amino acid
  VARIANT 46: note = Any amino acid
  VARIANT 47: note = Any amino acid
  VARIANT 48: note = Any amino acid
  VARIANT 49: note = Any amino acid
  VARIANT 50: note = Any amino acid
  VARIANT 51: note = Any amino acid
GXXXXXXXXXXXXXXXXXXXXXXXXXXXXXGXXXXXXXSRXXXXXXXXXXXG

SEQ ID NO: 797413 - protein, 53 aa, unidentified
  VARIANT 2: note = Any amino acid
  VARIANT 3: note = Any amino acid
  VARIANT 4: note = Any amino acid
  VARIANT 5: note = Any amino acid
  VARIANT 6: note = Any amino acid
  VARIANT 7: note = Any amino acid
  VARIANT 8: note = Any amino acid
  VARIANT 9: note = Any amino acid
  VARIANT 10: note = Any amino acid
  VARIANT 11: note = Any amino acid
  VARIANT 12: note = Any amino acid
  VARIANT 13: note = Any amino acid
  VARIANT 14: note = Any amino acid
  VARIANT 15: note = Any amino acid
  VARIANT 16: note = Any amino acid
  VARIANT 17: note = Any amino acid
  VARIANT 18: note = Any amino acid
  VARIANT 19: note = Any amino acid
  VARIANT 20: note = Any amino acid
  VARIANT 21: note = Any amino acid
  VARIANT 22: note = Any amino acid
  VARIANT 23: note = Any amino acid
  VARIANT 24: note = Any amino acid
  VARIANT 25: note = Any amino acid
  VARIANT 26: note = Any amino acid
  VARIANT 27: note = Any amino acid
  VARIANT 28: note = Any amino acid
  VARIANT 29: note = Any amino acid
  VARIANT 30: note = Any amino acid
  VARIANT 32: note = Any amino acid
  VARIANT 33: note = Any amino acid
  VARIANT 34: note = Any amino acid
  VARIANT 35: note = Any amino acid
  VARIANT 36: note = Any amino acid
  VARIANT 37: note = Any amino acid
  VARIANT 38: note = Any amino acid
  VARIANT 41: note = Any amino acid
  VARIANT 42: note = Any amino acid
  VARIANT 43: note = Any amino acid
  VARIANT 44: note = Any amino acid
  VARIANT 45: note = Any amino acid
  VARIANT 46: note = Any amino acid
  VARIANT 47: note = Any amino acid
  VARIANT 48: note = Any amino acid
  VARIANT 49: note = Any amino acid
  VARIANT 50: note = Any amino acid
  VARIANT 51: note = Any amino acid
  VARIANT 52: note = Any amino acid
GXXXXXXXXXXXXXXXXXXXXXXXXXXXXXGXXXXXXXSVXXXXXXXXXXXXG

SEQ ID NO: 797414 - protein, 51 aa, unidentified
  VARIANT 2: note = Any amino acid
  VARIANT 3: note = Any amino acid
  VARIANT 4: note = Any amino acid
  VARIANT 5: note = Any amino acid
  VARIANT 6: note = Any amino acid
  VARIANT 7: note = Any amino acid
  VARIANT 8: note = Any amino acid
  VARIANT 9: note = Any amino acid
  VARIANT 10: note = Any amino acid
  VARIANT 11: note = Any amino acid
  VARIANT 12: note = Any amino acid
  VARIANT 13: note = Any amino acid
  VARIANT 14: note = Any amino acid
  VARIANT 15: note = Any amino acid
  VARIANT 16: note = Any amino acid
  VARIANT 17: note = Any amino acid
  VARIANT 18: note = Any amino acid
  VARIANT 19: note = Any amino acid
  VARIANT 20: note = Any amino acid
  VARIANT 21: note = Any amino acid
  VARIANT 22: note = Any amino acid
  VARIANT 23: note = Any amino acid
  VARIANT 24: note = Any amino acid
  VARIANT 25: note = Any amino acid
  VARIANT 26: note = Any amino acid
  VARIANT 27: note = Any amino acid
  VARIANT 28: note = Any amino acid
  VARIANT 29: note = Any amino acid
  VARIANT 30: note = Any amino acid
  VARIANT 32: note = Any amino acid
  VARIANT 33: note = Any amino acid
  VARIANT 34: note = Any amino acid
  VARIANT 35: note = Any amino acid
  VARIANT 36: note = Any amino acid
  VARIANT 37: note = Any amino acid
  VARIANT 38: note = Any amino acid
  VARIANT 41: note = Any amino acid
  VARIANT 42: note = Any amino acid
  VARIANT 43: note = Any amino acid
  VARIANT 44: note = Any amino acid
  VARIANT 45: note = Any amino acid
  VARIANT 46: note = Any amino acid
  VARIANT 47: note = Any amino acid
  VARIANT 48: note = Any amino acid
  VARIANT 49: note = Any amino acid
  VARIANT 50: note = Any amino acid
GXXXXXXXXXXXXXXXXXXXXXXXXXXXXXGXXXXXXXTGXXXXXXXXXXV

SEQ ID NO: 797415 - protein, 54 aa, unidentified
  VARIANT 2: note = Any amino acid
  VARIANT 3: note = Any amino acid
  VARIANT 4: note = Any amino acid
  VARIANT 5: note = Any amino acid
  VARIANT 6: note = Any amino acid
  VARIANT 7: note = Any amino acid
  VARIANT 8: note = Any amino acid
  VARIANT 9: note = Any amino acid
  VARIANT 10: note = Any amino acid
  VARIANT 11: note = Any amino acid
  VARIANT 12: note = Any amino acid
  VARIANT 13: note = Any amino acid
  VARIANT 14: note = Any amino acid
  VARIANT 15: note = Any amino acid
  VARIANT 16: note = Any amino acid
  VARIANT 17: note = Any amino acid
  VARIANT 18: note = Any amino acid
  VARIANT 19: note = Any amino acid
  VARIANT 20: note = Any amino acid
  VARIANT 21: note = Any amino acid
  VARIANT 22: note = Any amino acid
  VARIANT 23: note = Any amino acid
  VARIANT 24: note = Any amino acid
  VARIANT 25: note = Any amino acid
  VARIANT 26: note = Any amino acid
  VARIANT 27: note = Any amino acid
  VARIANT 28: note = Any amino acid
  VARIANT 29: note = Any amino acid
  VARIANT 30: note = Any amino acid
  VARIANT 32: note = Any amino acid
  VARIANT 33: note = Any amino acid
  VARIANT 34: note = Any amino acid
  VARIANT 35: note = Any amino acid
  VARIANT 36: note = Any amino acid
  VARIANT 37: note = Any amino acid
  VARIANT 38: note = Any amino acid
  VARIANT 41: note = Any amino acid
  VARIANT 42: note = Any amino acid
  VARIANT 43: note = Any amino acid
  VARIANT 44: note = Any amino acid
  VARIANT 45: note = Any amino acid
  VARIANT 46: note = Any amino acid
  VARIANT 47: note = Any amino acid
  VARIANT 48: note = Any amino acid
  VARIANT 49: note = Any amino acid
  VARIANT 50: note = Any amino acid
  VARIANT 51: note = Any amino acid
  VARIANT 52: note = Any amino acid
  VARIANT 53: note = Any amino acid
GXXXXXXXXXXXXXXXXXXXXXXXXXXXXXGXXXXXXXTGXXXXXXXXXXXXXC

SEQ ID NO: 797416 - protein, 60 aa, unidentified
  VARIANT 2: note = Any amino acid
  VARIANT 3: note = Any amino acid
  VARIANT 4: note = Any amino acid
  VARIANT 5: note = Any amino acid
  VARIANT 6: note = Any amino acid
  VARIANT 7: note = Any amino acid
  VARIANT 8: note = Any amino acid
  VARIANT 9: note = Any amino acid
  VARIANT 10: note = Any amino acid
  VARIANT 11: note = Any amino acid
  VARIANT 12: note = Any amino acid
  VARIANT 13: note = Any amino acid
  VARIANT 14: note = Any amino acid
  VARIANT 15: note = Any amino acid
  VARIANT 16: note = Any amino acid
  VARIANT 17: note = Any amino acid
  VARIANT 18: note = Any amino acid
  VARIANT 19: note = Any amino acid
  VARIANT 20: note = Any amino acid
  VARIANT 21: note = Any amino acid
  VARIANT 22: note = Any amino acid
  VARIANT 23: note = Any amino acid
  VARIANT 24: note = Any amino acid
  VARIANT 25: note = Any amino acid
  VARIANT 26: note = Any amino acid
  VARIANT 27: note = Any amino acid
  VARIANT 28: note = Any amino acid
  VARIANT 29: note = Any amino acid
  VARIANT 30: note = Any amino acid
  VARIANT 32: note = Any amino acid
  VARIANT 33: note = Any amino acid
  VARIANT 34: note = Any amino acid
  VARIANT 35: note = Any amino acid
  VARIANT 36: note = Any amino acid
  VARIANT 37: note = Any amino acid
  VARIANT 38: note = Any amino acid
  VARIANT 39: note = Any amino acid
  VARIANT 42: note = Any amino acid
  VARIANT 43: note = Any amino acid
  VARIANT 44: note = Any amino acid
  VARIANT 45: note = Any amino acid
  VARIANT 46: note = Any amino acid
  VARIANT 47: note = Any amino acid
  VARIANT 48: note = Any amino acid
  VARIANT 49: note = Any amino acid
  VARIANT 50: note = Any amino acid
  VARIANT 51: note = Any amino acid
  VARIANT 52: note = Any amino acid
  VARIANT 53: note = Any amino acid
  VARIANT 54: note = Any amino acid
  VARIANT 55: note = Any amino acid
  VARIANT 56: note = Any amino acid
  VARIANT 57: note = Any amino acid
  VARIANT 58: note = Any amino acid
  VARIANT 59: note = Any amino acid
GXXXXXXXXXXXXXXXXXXXXXXXXXXXXXGXXXXXXXXSGXXXXXXXXXXXXXXXXXXG

SEQ ID NO: 797417 - protein, 53 aa, unidentified
  VARIANT 2: note = Any amino acid
  VARIANT 3: note = Any amino acid
  VARIANT 4: note = Any amino acid
  VARIANT 5: note = Any amino acid
  VARIANT 6: note = Any amino acid
  VARIANT 7: note = Any amino acid
  VARIANT 8: note = Any amino acid
  VARIANT 9: note = Any amino acid
  VARIANT 10: note = Any amino acid
  VARIANT 11: note = Any amino acid
  VARIANT 12: note = Any amino acid
  VARIANT 13: note = Any amino acid
  VARIANT 14: note = Any amino acid
  VARIANT 15: note = Any amino acid
  VARIANT 16: note = Any amino acid
  VARIANT 17: note = Any amino acid
  VARIANT 18: note = Any amino acid
  VARIANT 19: note = Any amino acid
  VARIANT 20: note = Any amino acid
  VARIANT 21: note = Any amino acid
  VARIANT 22: note = Any amino acid
  VARIANT 23: note = Any amino acid
  VARIANT 24: note = Any amino acid
  VARIANT 25: note = Any amino acid
  VARIANT 26: note = Any amino acid
  VARIANT 27: note = Any amino acid
  VARIANT 28: note = Any amino acid
  VARIANT 29: note = Any amino acid
  VARIANT 30: note = Any amino acid
  VARIANT 31: note = Any amino acid
  VARIANT 33: note = Any amino acid
  VARIANT 34: note = Any amino acid
  VARIANT 35: note = Any amino acid
  VARIANT 36: note = Any amino acid
  VARIANT 37: note = Any amino acid
  VARIANT 38: note = Any amino acid
  VARIANT 39: note = Any amino acid
  VARIANT 42: note = Any amino acid
  VARIANT 43: note = Any amino acid
  VARIANT 44: note = Any amino acid
  VARIANT 45: note = Any amino acid
  VARIANT 46: note = Any amino acid
  VARIANT 47: note = Any amino acid
  VARIANT 48: note = Any amino acid
  VARIANT 49: note = Any amino acid
  VARIANT 50: note = Any amino acid
  VARIANT 51: note = Any amino acid
  VARIANT 52: note = Any amino acid
GXXXXXXXXXXXXXXXXXXXXXXXXXXXXXXCXXXXXXXSGXXXXXXXXXXXS

SEQ ID NO: 797418 - protein, 52 aa, unidentified
  VARIANT 2: note = Any amino acid
  VARIANT 3: note = Any amino acid
  VARIANT 4: note = Any amino acid
  VARIANT 5: note = Any amino acid
  VARIANT 6: note = Any amino acid
  VARIANT 7: note = Any amino acid
  VARIANT 8: note = Any amino acid
  VARIANT 9: note = Any amino acid
  VARIANT 10: note = Any amino acid
  VARIANT 11: note = Any amino acid
  VARIANT 12: note = Any amino acid
  VARIANT 13: note = Any amino acid
  VARIANT 14: note = Any amino acid
  VARIANT 15: note = Any amino acid
  VARIANT 16: note = Any amino acid
  VARIANT 17: note = Any amino acid
  VARIANT 18: note = Any amino acid
  VARIANT 19: note = Any amino acid
  VARIANT 20: note = Any amino acid
  VARIANT 21: note = Any amino acid
  VARIANT 22: note = Any amino acid
  VARIANT 23: note = Any amino acid
  VARIANT 24: note = Any amino acid
  VARIANT 25: note = Any amino acid
  VARIANT 26: note = Any amino acid
  VARIANT 27: note = Any amino acid
  VARIANT 28: note = Any amino acid
  VARIANT 29: note = Any amino acid
  VARIANT 30: note = Any amino acid
  VARIANT 31: note = Any amino acid
  VARIANT 33: note = Any amino acid
  VARIANT 34: note = Any amino acid
  VARIANT 35: note = Any amino acid
  VARIANT 36: note = Any amino acid
  VARIANT 37: note = Any amino acid
  VARIANT 38: note = Any amino acid
  VARIANT 39: note = Any amino acid
  VARIANT 42: note = Any amino acid
  VARIANT 43: note = Any amino acid
  VARIANT 44: note = Any amino acid
  VARIANT 45: note = Any amino acid
  VARIANT 46: note = Any amino acid
  VARIANT 47: note = Any amino acid
  VARIANT 48: note = Any amino acid
  VARIANT 49: note = Any amino acid
  VARIANT 50: note = Any amino acid
  VARIANT 51: note = Any amino acid
GXXXXXXXXXXXXXXXXXXXXXXXXXXXXXXGXXXXXXXSAXXXXXXXXXXH

SEQ ID NO: 797419 - protein, 5 aa, unidentified
  VARIANT 4: note = I or V
IPGXG

SEQ ID NO: 797420 - protein, 5 aa, unidentified
VPGVG

SEQ ID NO: 797421 - protein, 5 aa, unidentified
VPGIG

SEQ ID NO: 797422 - protein, 5 aa, unidentified
LPGAG

SEQ ID NO: 797423 - protein, 5 aa, unidentified
IKGIG

SEQ ID NO: 797424 - protein, 5 aa, unidentified
IPGIS

SEQ ID NO: 797425 - protein, 5 aa, unidentified
IKGVG

SEQ ID NO: 797426 - protein, 5 aa, unidentified
LPGVG

SEQ ID NO: 797427 - protein, 5 aa, unidentified
IPGFG

SEQ ID NO: 797428 - protein, 5 aa, unidentified
IPGVS

SEQ ID NO: 797429 - protein, 5 aa, unidentified
IPGVD

SEQ ID NO: 797430 - protein, 5 aa, unidentified
IPGLG

SEQ ID NO: 797431 - protein, 5 aa, unidentified
VKGVG

SEQ ID NO: 797432 - protein, 5 aa, unidentified
IPGIA

SEQ ID NO: 797433 - protein, 5 aa, unidentified
VPGLG

SEQ ID NO: 797434 - protein, 5 aa, unidentified
IPGID

SEQ ID NO: 797435 - protein, 5 aa, unidentified
VKGIG

SEQ ID NO: 797436 - protein, 5 aa, unidentified
APGVG

SEQ ID NO: 797437 - protein, 5 aa, unidentified
IDGIG

SEQ ID NO: 797438 - protein, 5 aa, unidentified
MPGVG

SEQ ID NO: 797439 - protein, 5 aa, unidentified
FPGAG

SEQ ID NO: 797440 - protein, 5 aa, unidentified
ITGIG

SEQ ID NO: 797441 - protein, 5 aa, unidentified
MPGIG

SEQ ID NO: 797442 - protein, 5 aa, unidentified
IDGID

SEQ ID NO: 797443 - protein, 5 aa, unidentified
IPGIN

SEQ ID NO: 797444 - protein, 5 aa, unidentified
LPGIG

SEQ ID NO: 797445 - protein, 5 aa, unidentified
LPGLG

SEQ ID NO: 797446 - protein, 5 aa, unidentified
IPGVA

SEQ ID NO: 797447 - protein, 5 aa, unidentified
IPGVN

SEQ ID NO: 797448 - protein, 5 aa, unidentified
QPGLG

SEQ ID NO: 797449 - protein, 5 aa, unidentified
ITGVG

SEQ ID NO: 797450 - protein, 5 aa, unidentified
IPGVK

SEQ ID NO: 797451 - protein, 5 aa, unidentified
IKGVA

SEQ ID NO: 797452 - protein, 5 aa, unidentified
VPGIS

SEQ ID NO: 797453 - protein, 5 aa, unidentified
LPGMG

SEQ ID NO: 797454 - protein, 5 aa, unidentified
APGIG

SEQ ID NO: 797455 - protein, 5 aa, unidentified
VPGFG

SEQ ID NO: 797456 - protein, 5 aa, unidentified
LPGCG

SEQ ID NO: 797457 - protein, 5 aa, unidentified
LFGVG

SEQ ID NO: 797458 - protein, 5 aa, unidentified
IPGIK

SEQ ID NO: 797459 - protein, 5 aa, unidentified
IKGLG

SEQ ID NO: 797460 - protein, 5 aa, unidentified
IDGVG

SEQ ID NO: 797461 - protein, 5 aa, unidentified
VTGIG

SEQ ID NO: 797462 - protein, 5 aa, unidentified
FPGLG

SEQ ID NO: 797463 - protein, 5 aa, unidentified
LYGVG

SEQ ID NO: 797464 - protein, 5 aa, unidentified
MYGVG

SEQ ID NO: 797465 - protein, 5 aa, unidentified
LPRAG

SEQ ID NO: 797466 - protein, 5 aa, unidentified
TPGVG

SEQ ID NO: 797467 - protein, 5 aa, unidentified
IPGLS

SEQ ID NO: 797468 - protein, 5 aa, unidentified
LPRSG

SEQ ID NO: 797469 - protein, 5 aa, unidentified
LKGVG

SEQ ID NO: 797470 - protein, 5 aa, unidentified
IRGIG

SEQ ID NO: 797471 - protein, 5 aa, unidentified
VVGIG

SEQ ID NO: 797472 - protein, 5 aa, unidentified
IDGIS

SEQ ID NO: 797473 - protein, 5 aa, unidentified
AKGVG

SEQ ID NO: 797474 - protein, 5 aa, unidentified
IPGMG

SEQ ID NO: 797475 - protein, 5 aa, unidentified
LPGVA

SEQ ID NO: 797476 - protein, 5 aa, unidentified
MKGVG

SEQ ID NO: 797477 - protein, 5 aa, unidentified
FPRAG

SEQ ID NO: 797478 - protein, 5 aa, unidentified
IVGIG

SEQ ID NO: 797479 - protein, 5 aa, unidentified
FPGIG

SEQ ID NO: 797480 - protein, 5 aa, unidentified
ISGIG

SEQ ID NO: 797481 - protein, 5 aa, unidentified
VDGIG

SEQ ID NO: 797482 - protein, 5 aa, unidentified
IFGVG

SEQ ID NO: 797483 - protein, 5 aa, unidentified
VPGIA

SEQ ID NO: 797484 - protein, 5 aa, unidentified
IPAVG

SEQ ID NO: 797485 - protein, 5 aa, unidentified
VKGLG

SEQ ID NO: 797486 - protein, 5 aa, unidentified
VDGVG

SEQ ID NO: 797487 - protein, 5 aa, unidentified
IPGCG

SEQ ID NO: 797488 - protein, 5 aa, unidentified
EPGVG

SEQ ID NO: 797489 - protein, 5 aa, unidentified
IVGVG

SEQ ID NO: 797490 - protein, 5 aa, unidentified
IYGVG

SEQ ID NO: 797491 - protein, 5 aa, unidentified
TPGIG

SEQ ID NO: 797492 - protein, 5 aa, unidentified
IPGVQ

SEQ ID NO: 797493 - protein, 5 aa, unidentified
IKGIS

SEQ ID NO: 797494 - protein, 5 aa, unidentified
LHGVG

SEQ ID NO: 797495 - protein, 5 aa, unidentified
MPGFG

SEQ ID NO: 797496 - protein, 5 aa, unidentified
LPGFG

SEQ ID NO: 797497 - protein, 5 aa, unidentified
VPGID

SEQ ID NO: 797498 - protein, 5 aa, unidentified
FKGIG

SEQ ID NO: 797499 - protein, 5 aa, unidentified
IPAIG

SEQ ID NO: 797500 - protein, 5 aa, unidentified
IPGIQ

SEQ ID NO: 797501 - protein, 5 aa, unidentified
IDGIN

SEQ ID NO: 797502 - protein, 5 aa, unidentified
VFGVG

SEQ ID NO: 797503 - protein, 5 aa, unidentified
QPGIG

SEQ ID NO: 797504 - protein, 5 aa, unidentified
IEGID

SEQ ID NO: 797505 - protein, 5 aa, unidentified
VQGVG

SEQ ID NO: 797506 - protein, 5 aa, unidentified
VTGVG

SEQ ID NO: 797507 - protein, 5 aa, unidentified
IDGLD

SEQ ID NO: 797508 - protein, 5 aa, unidentified
LPGAK

SEQ ID NO: 797509 - protein, 5 aa, unidentified
LHGIG

SEQ ID NO: 797510 - protein, 5 aa, unidentified
IHGIG

SEQ ID NO: 797511 - protein, 5 aa, unidentified
IDAIG

SEQ ID NO: 797512 - protein, 5 aa, unidentified
IPSIG

SEQ ID NO: 797513 - protein, 5 aa, unidentified
MKGIG

SEQ ID NO: 797514 - protein, 5 aa, unidentified
IKGIA

SEQ ID NO: 797515 - protein, 5 aa, unidentified
VSGIG

SEQ ID NO: 797516 - protein, 5 aa, unidentified
VYGVG

SEQ ID NO: 797517 - protein, 5 aa, unidentified
IPGIE

SEQ ID NO: 797518 - protein, 5 aa, unidentified
ISGVG

SEQ ID NO: 797519 - protein, 5 aa, unidentified
FKGVG

SEQ ID NO: 797520 - protein, 5 aa, unidentified
VPGIN

SEQ ID NO: 797521 - protein, 5 aa, unidentified
FPGVG

SEQ ID NO: 797522 - protein, 5 aa, unidentified
VPGIQ

SEQ ID NO: 797523 - protein, 5 aa, unidentified
IPGVE

SEQ ID NO: 797524 - protein, 5 aa, unidentified
IAGIG

SEQ ID NO: 797525 - protein, 5 aa, unidentified
IEGVS

SEQ ID NO: 797526 - protein, 5 aa, unidentified
VRGIG

SEQ ID NO: 797527 - protein, 5 aa, unidentified
IPGFD

SEQ ID NO: 797528 - protein, 5 aa, unidentified
AKGIG

SEQ ID NO: 797529 - protein, 5 aa, unidentified
INGVG

SEQ ID NO: 797530 - protein, 5 aa, unidentified
IPGFS

SEQ ID NO: 797531 - protein, 5 aa, unidentified
IRGVG

SEQ ID NO: 797532 - protein, 5 aa, unidentified
MPGVS

SEQ ID NO: 797533 - protein, 5 aa, unidentified
LKGIG

SEQ ID NO: 797534 - protein, 5 aa, unidentified
MPGLG

SEQ ID NO: 797535 - protein, 5 aa, unidentified
VPGLA

SEQ ID NO: 797536 - protein, 5 aa, unidentified
INGIG

SEQ ID NO: 797537 - protein, 5 aa, unidentified
VVGVG

SEQ ID NO: 797538 - protein, 5 aa, unidentified
IAGVG

SEQ ID NO: 797539 - protein, 5 aa, unidentified
IQGVG

SEQ ID NO: 797540 - protein, 5 aa, unidentified
MFGVG

SEQ ID NO: 797541 - protein, 5 aa, unidentified
LPGVD

SEQ ID NO: 797542 - protein, 5 aa, unidentified
LRGVG

SEQ ID NO: 797543 - protein, 5 aa, unidentified
VPGAG

SEQ ID NO: 797544 - protein, 5 aa, unidentified
EPGIG

SEQ ID NO: 797545 - protein, 5 aa, unidentified
MPGWG

SEQ ID NO: 797546 - protein, 5 aa, unidentified
VPGVS

SEQ ID NO: 797547 - protein, 5 aa, unidentified
LPGTG

SEQ ID NO: 797548 - protein, 5 aa, unidentified
VEGIG

SEQ ID NO: 797549 - protein, 5 aa, unidentified
VKGVA

SEQ ID NO: 797550 - protein, 5 aa, unidentified
VPGLS

SEQ ID NO: 797551 - protein, 5 aa, unidentified
LPGAA

SEQ ID NO: 797552 - protein, 5 aa, unidentified
IKGVS

SEQ ID NO: 797553 - protein, 5 aa, unidentified
IQGIG

SEQ ID NO: 797554 - protein, 5 aa, unidentified
MGGVG

SEQ ID NO: 797555 - protein, 5 aa, unidentified
LPGIS

SEQ ID NO: 797556 - protein, 5 aa, unidentified
LPGIA

SEQ ID NO: 797557 - protein, 5 aa, unidentified
IPGIR

SEQ ID NO: 797558 - protein, 5 aa, unidentified
VPGIK

SEQ ID NO: 797559 - protein, 5 aa, unidentified
VRGVG

SEQ ID NO: 797560 - protein, 5 aa, unidentified
IHGLG

SEQ ID NO: 797561 - protein, 5 aa, unidentified
VKGIA

SEQ ID NO: 797562 - protein, 5 aa, unidentified
VIGIG

SEQ ID NO: 797563 - protein, 5 aa, unidentified
IIGIG

SEQ ID NO: 797564 - protein, 5 aa, unidentified
IPGLD

SEQ ID NO: 797565 - protein, 5 aa, unidentified
LPGIT

SEQ ID NO: 797566 - protein, 5 aa, unidentified
MNGVG

SEQ ID NO: 797567 - protein, 5 aa, unidentified
VPGVD

SEQ ID NO: 797568 - protein, 5 aa, unidentified
IPGLN

SEQ ID NO: 797569 - protein, 5 aa, unidentified
QPGVG

SEQ ID NO: 797570 - protein, 5 aa, unidentified
IHGVG

SEQ ID NO: 797571 - protein, 5 aa, unidentified
IPGAG

SEQ ID NO: 797572 - protein, 5 aa, unidentified
VPGVA

SEQ ID NO: 797573 - protein, 5 aa, unidentified
IDGLG

SEQ ID NO: 797574 - protein, 5 aa, unidentified
VPGFD

SEQ ID NO: 797575 - protein, 5 aa, unidentified
VHGVG

SEQ ID NO: 797576 - protein, 5 aa, unidentified
VIGVG

SEQ ID NO: 797577 - protein, 5 aa, unidentified
MPGIS

SEQ ID NO: 797578 - protein, 5 aa, unidentified
APGLG

SEQ ID NO: 797579 - protein, 5 aa, unidentified
LPGSG

SEQ ID NO: 797580 - protein, 5 aa, unidentified
MPGMG

SEQ ID NO: 797581 - protein, 5 aa, unidentified
LPGLA

SEQ ID NO: 797582 - protein, 5 aa, unidentified
MPGID

SEQ ID NO: 797583 - protein, 5 aa, unidentified
VSGVG

SEQ ID NO: 797584 - protein, 5 aa, unidentified
IPGFA

SEQ ID NO: 797585 - protein, 5 aa, unidentified
ITGIS

SEQ ID NO: 797586 - protein, 5 aa, unidentified
VPSVG

SEQ ID NO: 797587 - protein, 5 aa, unidentified
IFGIG

SEQ ID NO: 797588 - protein, 5 aa, unidentified
MHGVG

SEQ ID NO: 797589 - protein, 5 aa, unidentified
IKGFG

SEQ ID NO: 797590 - protein, 5 aa, unidentified
LTGVG

SEQ ID NO: 797591 - protein, 5 aa, unidentified
VAGVG

SEQ ID NO: 797592 - protein, 5 aa, unidentified
IDGVD

SEQ ID NO: 797593 - protein, 5 aa, unidentified
VQGIG

SEQ ID NO: 797594 - protein, 5 aa, unidentified
RPGIG

SEQ ID NO: 797595 - protein, 5 aa, unidentified
VAGIG

SEQ ID NO: 797596 - protein, 5 aa, unidentified
FPGLA

SEQ ID NO: 797597 - protein, 5 aa, unidentified
QPGMG

SEQ ID NO: 797598 - protein, 5 aa, unidentified
IPGMS

SEQ ID NO: 797599 - protein, 5 aa, unidentified
LPRIG

SEQ ID NO: 797600 - protein, 5 aa, unidentified
VEGVG

SEQ ID NO: 797601 - protein, 5 aa, unidentified
IIGVG

SEQ ID NO: 797602 - protein, 5 aa, unidentified
LPGID

SEQ ID NO: 797603 - protein, 5 aa, unidentified
VPGWG

SEQ ID NO: 797604 - protein, 5 aa, unidentified
IPGLA

SEQ ID NO: 797605 - protein, 5 aa, unidentified
VPSIG

SEQ ID NO: 797606 - protein, 5 aa, unidentified
IFGIS

SEQ ID NO: 797607 - protein, 5 aa, unidentified
FPGIN

SEQ ID NO: 797608 - protein, 5 aa, unidentified
IDGIA

SEQ ID NO: 797609 - protein, 5 aa, unidentified
IEGIE

SEQ ID NO: 797610 - protein, 5 aa, unidentified
IPGLT

SEQ ID NO: 797611 - protein, 5 aa, unidentified
IPGIT

SEQ ID NO: 797612 - protein, 5 aa, unidentified
LYGIG

SEQ ID NO: 797613 - protein, 5 aa, unidentified
LVGVG

SEQ ID NO: 797614 - protein, 5 aa, unidentified
IDGLN

SEQ ID NO: 797615 - protein, 5 aa, unidentified
IPGYG

SEQ ID NO: 797616 - protein, 5 aa, unidentified
IPSVG

SEQ ID NO: 797617 - protein, 5 aa, unidentified
ITGFG

SEQ ID NO: 797618 - protein, 5 aa, unidentified
IPTIG

SEQ ID NO: 797619 - protein, 5 aa, unidentified
MPGIA

SEQ ID NO: 797620 - protein, 5 aa, unidentified
TKGVG

SEQ ID NO: 797621 - protein, 5 aa, unidentified
VPGMG

SEQ ID NO: 797622 - protein, 5 aa, unidentified
LKGLS

SEQ ID NO: 797623 - protein, 5 aa, unidentified
MPGCG

SEQ ID NO: 797624 - protein, 5 aa, unidentified
ASGCG

SEQ ID NO: 797625 - protein, 5 aa, unidentified
LPGIN

SEQ ID NO: 797626 - protein, 5 aa, unidentified
LSGVG

SEQ ID NO: 797627 - protein, 5 aa, unidentified
LPGCA

SEQ ID NO: 797628 - protein, 5 aa, unidentified
MRGVG

SEQ ID NO: 797629 - protein, 5 aa, unidentified
VPGCG

SEQ ID NO: 797630 - protein, 5 aa, unidentified
LLGVG

SEQ ID NO: 797631 - protein, 5 aa, unidentified
MPGVD

SEQ ID NO: 797632 - protein, 5 aa, unidentified
MSGVG

SEQ ID NO: 797633 - protein, 5 aa, unidentified
RPGVG

SEQ ID NO: 797634 - protein, 5 aa, unidentified
VPGLN

SEQ ID NO: 797635 - protein, 5 aa, unidentified
IDGIE

SEQ ID NO: 797636 - protein, 5 aa, unidentified
IPSFG

SEQ ID NO: 797637 - protein, 5 aa, unidentified
IYGIG

SEQ ID NO: 797638 - protein, 5 aa, unidentified
VHGIG

SEQ ID NO: 797639 - protein, 5 aa, unidentified
VNGIG

SEQ ID NO: 797640 - protein, 5 aa, unidentified
IDGVS

SEQ ID NO: 797641 - protein, 5 aa, unidentified
ISGIT

SEQ ID NO: 797642 - protein, 5 aa, unidentified
LRGIG

SEQ ID NO: 797643 - protein, 5 aa, unidentified
IGGIG

SEQ ID NO: 797644 - protein, 5 aa, unidentified
IPCIG

SEQ ID NO: 797645 - protein, 5 aa, unidentified
MTGID

SEQ ID NO: 797646 - protein, 5 aa, unidentified
ICGVG

SEQ ID NO: 797647 - protein, 5 aa, unidentified
IEGIS

SEQ ID NO: 797648 - protein, 5 aa, unidentified
IKGAG

SEQ ID NO: 797649 - protein, 5 aa, unidentified
LKGIS

SEQ ID NO: 797650 - protein, 5 aa, unidentified
VDGFG

SEQ ID NO: 797651 - protein, 5 aa, unidentified
VPGLD

SEQ ID NO: 797652 - protein, 5 aa, unidentified
FTGIG

SEQ ID NO: 797653 - protein, 5 aa, unidentified
VPAVG

SEQ ID NO: 797654 - protein, 5 aa, unidentified
ITGIA

SEQ ID NO: 797655 - protein, 5 aa, unidentified
LNGVG

SEQ ID NO: 797656 - protein, 5 aa, unidentified
LPGVS

SEQ ID NO: 797657 - protein, 5 aa, unidentified
LQGVG

SEQ ID NO: 797658 - protein, 5 aa, unidentified
LQGCG

SEQ ID NO: 797659 - protein, 5 aa, unidentified
MPGVA

SEQ ID NO: 797660 - protein, 5 aa, unidentified
VDGLD

SEQ ID NO: 797661 - protein, 5 aa, unidentified
FYGVG

SEQ ID NO: 797662 - protein, 5 aa, unidentified
INGLG

SEQ ID NO: 797663 - protein, 5 aa, unidentified
VPGIR

SEQ ID NO: 797664 - protein, 5 aa, unidentified
FPAAG

SEQ ID NO: 797665 - protein, 5 aa, unidentified
IYGIS

SEQ ID NO: 797666 - protein, 5 aa, unidentified
VPGFA

SEQ ID NO: 797667 - protein, 5 aa, unidentified
AFGVG

SEQ ID NO: 797668 - protein, 5 aa, unidentified
ISGIN

SEQ ID NO: 797669 - protein, 5 aa, unidentified
ITGLS

SEQ ID NO: 797670 - protein, 5 aa, unidentified
IRGLG

SEQ ID NO: 797671 - protein, 5 aa, unidentified
MPGIN

SEQ ID NO: 797672 - protein, 5 aa, unidentified
MPRIG

SEQ ID NO: 797673 - protein, 5 aa, unidentified
VCGIG

SEQ ID NO: 797674 - protein, 5 aa, unidentified
IPGLE

SEQ ID NO: 797675 - protein, 5 aa, unidentified
IPGVR

SEQ ID NO: 797676 - protein, 5 aa, unidentified
AHGVG

SEQ ID NO: 797677 - protein, 5 aa, unidentified
IKSVG

SEQ ID NO: 797678 - protein, 5 aa, unidentified
LFGIG

SEQ ID NO: 797679 - protein, 5 aa, unidentified
LPGAD

SEQ ID NO: 797680 - protein, 5 aa, unidentified
CKGIG

SEQ ID NO: 797681 - protein, 5 aa, unidentified
IDGLS

SEQ ID NO: 797682 - protein, 5 aa, unidentified
IHGCG

SEQ ID NO: 797683 - protein, 5 aa, unidentified
IKGMG

SEQ ID NO: 797684 - protein, 5 aa, unidentified
LAGVG

SEQ ID NO: 797685 - protein, 5 aa, unidentified
LCGVG

SEQ ID NO: 797686 - protein, 5 aa, unidentified
VPGFS

SEQ ID NO: 797687 - protein, 5 aa, unidentified
VTGIA

SEQ ID NO: 797688 - protein, 5 aa, unidentified
IDGVN

SEQ ID NO: 797689 - protein, 5 aa, unidentified
LKGVA

SEQ ID NO: 797690 - protein, 5 aa, unidentified
LNGIG

SEQ ID NO: 797691 - protein, 5 aa, unidentified
VCGVG

SEQ ID NO: 797692 - protein, 5 aa, unidentified
ITGVS

SEQ ID NO: 797693 - protein, 5 aa, unidentified
VPEFG

SEQ ID NO: 797694 - protein, 5 aa, unidentified
APGVA

SEQ ID NO: 797695 - protein, 5 aa, unidentified
FRGVG

SEQ ID NO: 797696 - protein, 5 aa, unidentified
LPRVG

SEQ ID NO: 797697 - protein, 5 aa, unidentified
VPGLQ

SEQ ID NO: 797698 - protein, 5 aa, unidentified
VRGIA

SEQ ID NO: 797699 - protein, 5 aa, unidentified
ICGIG

SEQ ID NO: 797700 - protein, 5 aa, unidentified
IEGLS

SEQ ID NO: 797701 - protein, 5 aa, unidentified
LPGLS

SEQ ID NO: 797702 - protein, 5 aa, unidentified
MPGLS

SEQ ID NO: 797703 - protein, 5 aa, unidentified
TPGLG

SEQ ID NO: 797704 - protein, 5 aa, unidentified
VDGID

SEQ ID NO: 797705 - protein, 5 aa, unidentified
VPGVQ

SEQ ID NO: 797706 - protein, 5 aa, unidentified
EPGFG

SEQ ID NO: 797707 - protein, 5 aa, unidentified
FPGIS

SEQ ID NO: 797708 - protein, 5 aa, unidentified
LPAAG

SEQ ID NO: 797709 - protein, 5 aa, unidentified
HPGIN

SEQ ID NO: 797710 - protein, 5 aa, unidentified
ITGCG

SEQ ID NO: 797711 - protein, 5 aa, unidentified
LDGVG

SEQ ID NO: 797712 - protein, 5 aa, unidentified
VGGVG

SEQ ID NO: 797713 - protein, 5 aa, unidentified
VHGIS

SEQ ID NO: 797714 - protein, 5 aa, unidentified
VNGVG

SEQ ID NO: 797715 - protein, 5 aa, unidentified
APGIA

SEQ ID NO: 797716 - protein, 5 aa, unidentified
FFGVG

SEQ ID NO: 797717 - protein, 5 aa, unidentified
FKGAG

SEQ ID NO: 797718 - protein, 5 aa, unidentified
FPRTG

SEQ ID NO: 797719 - protein, 5 aa, unidentified
IDSID

SEQ ID NO: 797720 - protein, 5 aa, unidentified
IEGVN

SEQ ID NO: 797721 - protein, 5 aa, unidentified
IHGFG

SEQ ID NO: 797722 - protein, 5 aa, unidentified
ILGIG

SEQ ID NO: 797723 - protein, 5 aa, unidentified
INGID

SEQ ID NO: 797724 - protein, 5 aa, unidentified
ITGVA

SEQ ID NO: 797725 - protein, 5 aa, unidentified
IYGLS

SEQ ID NO: 797726 - protein, 5 aa, unidentified
LTGIG

SEQ ID NO: 797727 - protein, 5 aa, unidentified
MPGAG

SEQ ID NO: 797728 - protein, 5 aa, unidentified
VPAIG

SEQ ID NO: 797729 - protein, 5 aa, unidentified
VPGVK

SEQ ID NO: 797730 - protein, 5 aa, unidentified
FNGIG

SEQ ID NO: 797731 - protein, 5 aa, unidentified
IKGLS

SEQ ID NO: 797732 - protein, 5 aa, unidentified
IPGCA

SEQ ID NO: 797733 - protein, 5 aa, unidentified
IRGLN

SEQ ID NO: 797734 - protein, 5 aa, unidentified
ISGIS

SEQ ID NO: 797735 - protein, 5 aa, unidentified
LNGCG

SEQ ID NO: 797736 - protein, 5 aa, unidentified
RFGVG

SEQ ID NO: 797737 - protein, 5 aa, unidentified
VPCVG

SEQ ID NO: 797738 - protein, 5 aa, unidentified
APGID

SEQ ID NO: 797739 - protein, 5 aa, unidentified
IPGVT

SEQ ID NO: 797740 - protein, 5 aa, unidentified
LVGCG

SEQ ID NO: 797741 - protein, 5 aa, unidentified
MTGVG

SEQ ID NO: 797742 - protein, 5 aa, unidentified
QKGVG

SEQ ID NO: 797743 - protein, 5 aa, unidentified
AFGIG

SEQ ID NO: 797744 - protein, 5 aa, unidentified
IPCVG

SEQ ID NO: 797745 - protein, 5 aa, unidentified
IPGMD

SEQ ID NO: 797746 - protein, 5 aa, unidentified
ITGLG

SEQ ID NO: 797747 - protein, 5 aa, unidentified
LDGIG

SEQ ID NO: 797748 - protein, 5 aa, unidentified
QFGVG

SEQ ID NO: 797749 - protein, 5 aa, unidentified
VFGIG

SEQ ID NO: 797750 - protein, 5 aa, unidentified
IGGVG

SEQ ID NO: 797751 - protein, 5 aa, unidentified
ISGLN

SEQ ID NO: 797752 - protein, 5 aa, unidentified
LPGAS

SEQ ID NO: 797753 - protein, 5 aa, unidentified
LPGLT

SEQ ID NO: 797754 - protein, 5 aa, unidentified
MAGID

SEQ ID NO: 797755 - protein, 5 aa, unidentified
MRGIG

SEQ ID NO: 797756 - protein, 5 aa, unidentified
VDGIS

SEQ ID NO: 797757 - protein, 5 aa, unidentified
VFGIS

SEQ ID NO: 797758 - protein, 5 aa, unidentified
IPPIG

SEQ ID NO: 797759 - protein, 5 aa, unidentified
LEGCG

SEQ ID NO: 797760 - protein, 5 aa, unidentified
LKGLG

SEQ ID NO: 797761 - protein, 5 aa, unidentified
LSGIG

SEQ ID NO: 797762 - protein, 5 aa, unidentified
TKGIG

SEQ ID NO: 797763 - protein, 5 aa, unidentified
ARGVG

SEQ ID NO: 797764 - protein, 5 aa, unidentified
CKGVG

SEQ ID NO: 797765 - protein, 5 aa, unidentified
VGVAP

SEQ ID NO: 797766 - protein, 5 aa, unidentified
AGVAP

SEQ ID NO: 797767 - protein, 5 aa, unidentified
AGLCP

SEQ ID NO: 797768 - protein, 5 aa, unidentified
AGLDP

SEQ ID NO: 797769 - protein, 5 aa, unidentified
LGLCP

SEQ ID NO: 797770 - protein, 5 aa, unidentified
VGLAP

SEQ ID NO: 797771 - protein, 5 aa, unidentified
AGVCP

SEQ ID NO: 797772 - protein, 5 aa, unidentified
NGTAP

SEQ ID NO: 797773 - protein, 5 aa, unidentified
CGVAP

SEQ ID NO: 797774 - protein, 5 aa, unidentified
SGIAP

SEQ ID NO: 797775 - protein, 5 aa, unidentified
AGIAP

SEQ ID NO: 797776 - protein, 5 aa, unidentified
AGTAP

SEQ ID NO: 797777 - protein, 5 aa, unidentified
AGLTP

SEQ ID NO: 797778 - protein, 5 aa, unidentified
AGMCP

SEQ ID NO: 797779 - protein, 5 aa, unidentified
AGLSP

SEQ ID NO: 797780 - protein, 5 aa, unidentified
AGTSP

SEQ ID NO: 797781 - protein, 5 aa, unidentified
LGLAP

SEQ ID NO: 797782 - protein, 5 aa, unidentified
AGLDV

SEQ ID NO: 797783 - protein, 5 aa, unidentified
AGLVP

SEQ ID NO: 797784 - protein, 5 aa, unidentified
SGVAP

SEQ ID NO: 797785 - protein, 5 aa, unidentified
AGLNL

SEQ ID NO: 797786 - protein, 5 aa, unidentified
AGIDP

SEQ ID NO: 797787 - protein, 5 aa, unidentified
CGVSP

SEQ ID NO: 797788 - protein, 5 aa, unidentified
AGLNP

SEQ ID NO: 797789 - protein, 5 aa, unidentified
AGLDL

SEQ ID NO: 797790 - protein, 5 aa, unidentified
TGTAP

SEQ ID NO: 797791 - protein, 5 aa, unidentified
IGVAP

SEQ ID NO: 797792 - protein, 5 aa, unidentified
AGAAP

SEQ ID NO: 797793 - protein, 5 aa, unidentified
AGICP

SEQ ID NO: 797794 - protein, 5 aa, unidentified
LGLSP

SEQ ID NO: 797795 - protein, 5 aa, unidentified
AGVSP

SEQ ID NO: 797796 - protein, 5 aa, unidentified
AGYDV

SEQ ID NO: 797797 - protein, 5 aa, unidentified
AGLEP

SEQ ID NO: 797798 - protein, 5 aa, unidentified
AGVDP

SEQ ID NO: 797799 - protein, 5 aa, unidentified
AGVVP

SEQ ID NO: 797800 - protein, 5 aa, unidentified
TGLAP

SEQ ID NO: 797801 - protein, 5 aa, unidentified
AGTCP

SEQ ID NO: 797802 - protein, 5 aa, unidentified
VGIAP

SEQ ID NO: 797803 - protein, 5 aa, unidentified
CGAAP

SEQ ID NO: 797804 - protein, 5 aa, unidentified
VGVCP

SEQ ID NO: 797805 - protein, 5 aa, unidentified
AGIDA

SEQ ID NO: 797806 - protein, 5 aa, unidentified
AGMSP

SEQ ID NO: 797807 - protein, 5 aa, unidentified
LGVAP

SEQ ID NO: 797808 - protein, 5 aa, unidentified
SGLDP

SEQ ID NO: 797809 - protein, 5 aa, unidentified
LRLAP

SEQ ID NO: 797810 - protein, 5 aa, unidentified
TGVAP

SEQ ID NO: 797811 - protein, 5 aa, unidentified
CGASP

SEQ ID NO: 797812 - protein, 5 aa, unidentified
CGIAP

SEQ ID NO: 797813 - protein, 5 aa, unidentified
CGLAP

SEQ ID NO: 797814 - protein, 5 aa, unidentified
LRLCP

SEQ ID NO: 797815 - protein, 5 aa, unidentified
AGSAP

SEQ ID NO: 797816 - protein, 5 aa, unidentified
SGLAP

SEQ ID NO: 797817 - protein, 5 aa, unidentified
AGLTW

SEQ ID NO: 797818 - protein, 5 aa, unidentified
VGVVP

SEQ ID NO: 797819 - protein, 5 aa, unidentified
LTLAP

SEQ ID NO: 797820 - protein, 5 aa, unidentified
SGTAP

SEQ ID NO: 797821 - protein, 5 aa, unidentified
GGVAP

SEQ ID NO: 797822 - protein, 5 aa, unidentified
CGTAP

SEQ ID NO: 797823 - protein, 5 aa, unidentified
AGVTP

SEQ ID NO: 797824 - protein, 5 aa, unidentified
IGLAP

SEQ ID NO: 797825 - protein, 5 aa, unidentified
TGIAP

SEQ ID NO: 797826 - protein, 5 aa, unidentified
MGLNL

SEQ ID NO: 797827 - protein, 5 aa, unidentified
AGLDI

SEQ ID NO: 797828 - protein, 5 aa, unidentified
CGVVP

SEQ ID NO: 797829 - protein, 5 aa, unidentified
FGLDP

SEQ ID NO: 797830 - protein, 5 aa, unidentified
CGLDP

SEQ ID NO: 797831 - protein, 5 aa, unidentified
AGLVW

SEQ ID NO: 797832 - protein, 5 aa, unidentified
AKFAP

SEQ ID NO: 797833 - protein, 5 aa, unidentified
TGLDP

SEQ ID NO: 797834 - protein, 5 aa, unidentified
AGLDA

SEQ ID NO: 797835 - protein, 5 aa, unidentified
VGLDP

SEQ ID NO: 797836 - protein, 5 aa, unidentified
AGLRP

SEQ ID NO: 797837 - protein, 5 aa, unidentified
AGMAP

SEQ ID NO: 797838 - protein, 5 aa, unidentified
FGLHP

SEQ ID NO: 797839 - protein, 5 aa, unidentified
AGCAP

SEQ ID NO: 797840 - protein, 5 aa, unidentified
SGLVP

SEQ ID NO: 797841 - protein, 5 aa, unidentified
VGACP

SEQ ID NO: 797842 - protein, 5 aa, unidentified
ARFAP

SEQ ID NO: 797843 - protein, 5 aa, unidentified
LGLNL

SEQ ID NO: 797844 - protein, 5 aa, unidentified
AGYNL

SEQ ID NO: 797845 - protein, 5 aa, unidentified
CGLDL

SEQ ID NO: 797846 - protein, 5 aa, unidentified
IGICP

SEQ ID NO: 797847 - protein, 5 aa, unidentified
AKLCP

SEQ ID NO: 797848 - protein, 5 aa, unidentified
AGLSL

SEQ ID NO: 797849 - protein, 5 aa, unidentified
VGICP

SEQ ID NO: 797850 - protein, 5 aa, unidentified
AGLAW

SEQ ID NO: 797851 - protein, 5 aa, unidentified
LNLCP

SEQ ID NO: 797852 - protein, 5 aa, unidentified
VGLCP

SEQ ID NO: 797853 - protein, 5 aa, unidentified
AATSP

SEQ ID NO: 797854 - protein, 5 aa, unidentified
AGCCP

SEQ ID NO: 797855 - protein, 5 aa, unidentified
GGLAP

SEQ ID NO: 797856 - protein, 5 aa, unidentified
AGLFP

SEQ ID NO: 797857 - protein, 5 aa, unidentified
CGACP

SEQ ID NO: 797858 - protein, 5 aa, unidentified
AGVNP

SEQ ID NO: 797859 - protein, 5 aa, unidentified
AGTNP

SEQ ID NO: 797860 - protein, 5 aa, unidentified
AALCP

SEQ ID NO: 797861 - protein, 5 aa, unidentified
AGQCP

SEQ ID NO: 797862 - protein, 5 aa, unidentified
LGLTP

SEQ ID NO: 797863 - protein, 5 aa, unidentified
LGLDV

SEQ ID NO: 797864 - protein, 5 aa, unidentified
IGVCP

SEQ ID NO: 797865 - protein, 5 aa, unidentified
LALCP

SEQ ID NO: 797866 - protein, 5 aa, unidentified
AKLSP

SEQ ID NO: 797867 - protein, 5 aa, unidentified
NATAP

SEQ ID NO: 797868 - protein, 5 aa, unidentified
VGLNP

SEQ ID NO: 797869 - protein, 5 aa, unidentified
LNLAP

SEQ ID NO: 797870 - protein, 5 aa, unidentified
AGLWW

SEQ ID NO: 797871 - protein, 5 aa, unidentified
AGISP

SEQ ID NO: 797872 - protein, 5 aa, unidentified
VGVIP

SEQ ID NO: 797873 - protein, 5 aa, unidentified
TGLVP

SEQ ID NO: 797874 - protein, 5 aa, unidentified
SGVVP

SEQ ID NO: 797875 - protein, 5 aa, unidentified
LRLSP

SEQ ID NO: 797876 - protein, 5 aa, unidentified
SGLCP

SEQ ID NO: 797877 - protein, 5 aa, unidentified
FGVHP

SEQ ID NO: 797878 - protein, 5 aa, unidentified
AGASP

SEQ ID NO: 797879 - protein, 5 aa, unidentified
VGLSP

SEQ ID NO: 797880 - protein, 5 aa, unidentified
ARLCP

SEQ ID NO: 797881 - protein, 5 aa, unidentified
AGYDI

SEQ ID NO: 797882 - protein, 5 aa, unidentified
CGTSP

SEQ ID NO: 797883 - protein, 5 aa, unidentified
AGFDL

SEQ ID NO: 797884 - protein, 5 aa, unidentified
VGTCP

SEQ ID NO: 797885 - protein, 5 aa, unidentified
AGIVP

SEQ ID NO: 797886 - protein, 5 aa, unidentified
AGLYP

SEQ ID NO: 797887 - protein, 5 aa, unidentified
CGVCP

SEQ ID NO: 797888 - protein, 5 aa, unidentified
AGYDL

SEQ ID NO: 797889 - protein, 5 aa, unidentified
VGTAP

SEQ ID NO: 797890 - protein, 5 aa, unidentified
AGFDV

SEQ ID NO: 797891 - protein, 5 aa, unidentified
AGYDP

SEQ ID NO: 797892 - protein, 5 aa, unidentified
AGITP

SEQ ID NO: 797893 - protein, 5 aa, unidentified
YGIAP

SEQ ID NO: 797894 - protein, 5 aa, unidentified
AGRCP

SEQ ID NO: 797895 - protein, 5 aa, unidentified
IGIAP

SEQ ID NO: 797896 - protein, 5 aa, unidentified
LCLAP

SEQ ID NO: 797897 - protein, 5 aa, unidentified
FGWAP

SEQ ID NO: 797898 - protein, 5 aa, unidentified
LGICP

SEQ ID NO: 797899 - protein, 5 aa, unidentified
FGVFP

SEQ ID NO: 797900 - protein, 5 aa, unidentified
NGSAP

SEQ ID NO: 797901 - protein, 5 aa, unidentified
SGYDV

SEQ ID NO: 797902 - protein, 5 aa, unidentified
SGLSP

SEQ ID NO: 797903 - protein, 5 aa, unidentified
LGLDP

SEQ ID NO: 797904 - protein, 5 aa, unidentified
AAICP

SEQ ID NO: 797905 - protein, 5 aa, unidentified
AGLTL

SEQ ID NO: 797906 - protein, 5 aa, unidentified
TGLCP

SEQ ID NO: 797907 - protein, 5 aa, unidentified
VGLVP

SEQ ID NO: 797908 - protein, 5 aa, unidentified
LGVVP

SEQ ID NO: 797909 - protein, 5 aa, unidentified
ACLCP

SEQ ID NO: 797910 - protein, 5 aa, unidentified
AGIEP

SEQ ID NO: 797911 - protein, 5 aa, unidentified
FGIDP

SEQ ID NO: 797912 - protein, 5 aa, unidentified
GGAAP

SEQ ID NO: 797913 - protein, 5 aa, unidentified
AGLDS

SEQ ID NO: 797914 - protein, 5 aa, unidentified
LGLIP

SEQ ID NO: 797915 - protein, 5 aa, unidentified
GGIAP

SEQ ID NO: 797916 - protein, 5 aa, unidentified
GGTAP

SEQ ID NO: 797917 - protein, 5 aa, unidentified
MGLCP

SEQ ID NO: 797918 - protein, 5 aa, unidentified
FGLAP

SEQ ID NO: 797919 - protein, 5 aa, unidentified
CGLSP

SEQ ID NO: 797920 - protein, 5 aa, unidentified
CGSSP

SEQ ID NO: 797921 - protein, 5 aa, unidentified
LGVCP

SEQ ID NO: 797922 - protein, 5 aa, unidentified
SGLVS

SEQ ID NO: 797923 - protein, 5 aa, unidentified
TGLTP

SEQ ID NO: 797924 - protein, 5 aa, unidentified
TGICP

SEQ ID NO: 797925 - protein, 5 aa, unidentified
AGTVP

SEQ ID NO: 797926 - protein, 5 aa, unidentified
LGIAP

SEQ ID NO: 797927 - protein, 5 aa, unidentified
SGLDV

SEQ ID NO: 797928 - protein, 5 aa, unidentified
AGRTP

SEQ ID NO: 797929 - protein, 5 aa, unidentified
CGLVP

SEQ ID NO: 797930 - protein, 5 aa, unidentified
CGVNP

SEQ ID NO: 797931 - protein, 5 aa, unidentified
VGLDV

SEQ ID NO: 797932 - protein, 5 aa, unidentified
AGACP

SEQ ID NO: 797933 - protein, 5 aa, unidentified
AGVDA

SEQ ID NO: 797934 - protein, 5 aa, unidentified
SGLTP

SEQ ID NO: 797935 - protein, 5 aa, unidentified
LSLCP

SEQ ID NO: 797936 - protein, 5 aa, unidentified
LTLCP

SEQ ID NO: 797937 - protein, 5 aa, unidentified
AGLYW

SEQ ID NO: 797938 - protein, 5 aa, unidentified
SGAAP

SEQ ID NO: 797939 - protein, 5 aa, unidentified
AGIQP

SEQ ID NO: 797940 - protein, 5 aa, unidentified
AGLNI

SEQ ID NO: 797941 - protein, 5 aa, unidentified
LCLCP

SEQ ID NO: 797942 - protein, 5 aa, unidentified
LGLNP

SEQ ID NO: 797943 - protein, 5 aa, unidentified
VGITP

SEQ ID NO: 797944 - protein, 5 aa, unidentified
VGVSP

SEQ ID NO: 797945 - protein, 5 aa, unidentified
AGTTP

SEQ ID NO: 797946 - protein, 5 aa, unidentified
AKVCP

SEQ ID NO: 797947 - protein, 5 aa, unidentified
LGMAP

SEQ ID NO: 797948 - protein, 5 aa, unidentified
VGLTP

SEQ ID NO: 797949 - protein, 5 aa, unidentified
AGMNL

SEQ ID NO: 797950 - protein, 5 aa, unidentified
CGLTP

SEQ ID NO: 797951 - protein, 5 aa, unidentified
IGVTP

SEQ ID NO: 797952 - protein, 5 aa, unidentified
LNLSP

SEQ ID NO: 797953 - protein, 5 aa, unidentified
MGLAP

SEQ ID NO: 797954 - protein, 5 aa, unidentified
YGVAP

SEQ ID NO: 797955 - protein, 5 aa, unidentified
AGSNP

SEQ ID NO: 797956 - protein, 5 aa, unidentified
ATLAP

SEQ ID NO: 797957 - protein, 5 aa, unidentified
IGLDV

SEQ ID NO: 797958 - protein, 5 aa, unidentified
VGIDI

SEQ ID NO: 797959 - protein, 5 aa, unidentified
AGMDP

SEQ ID NO: 797960 - protein, 5 aa, unidentified
AGTQP

SEQ ID NO: 797961 - protein, 5 aa, unidentified
ARVCP

SEQ ID NO: 797962 - protein, 5 aa, unidentified
AGQAP

SEQ ID NO: 797963 - protein, 5 aa, unidentified
CGFDL

SEQ ID NO: 797964 - protein, 5 aa, unidentified
CGLCP

SEQ ID NO: 797965 - protein, 5 aa, unidentified
FGIFP

SEQ ID NO: 797966 - protein, 5 aa, unidentified
IGLSP

SEQ ID NO: 797967 - protein, 5 aa, unidentified
VGAAP

SEQ ID NO: 797968 - protein, 5 aa, unidentified
VGVTP

SEQ ID NO: 797969 - protein, 5 aa, unidentified
AGLEA

SEQ ID NO: 797970 - protein, 5 aa, unidentified
IGIDP

SEQ ID NO: 797971 - protein, 5 aa, unidentified
IGLDP

SEQ ID NO: 797972 - protein, 5 aa, unidentified
SGMVP

SEQ ID NO: 797973 - protein, 5 aa, unidentified
AGAVP

SEQ ID NO: 797974 - protein, 5 aa, unidentified
AGLAI

SEQ ID NO: 797975 - protein, 5 aa, unidentified
AGSSP

SEQ ID NO: 797976 - protein, 5 aa, unidentified
AGIIP

SEQ ID NO: 797977 - protein, 5 aa, unidentified
AGINP

SEQ ID NO: 797978 - protein, 5 aa, unidentified
AGLAL

SEQ ID NO: 797979 - protein, 5 aa, unidentified
AGYAI

SEQ ID NO: 797980 - protein, 5 aa, unidentified
AAMCP

SEQ ID NO: 797981 - protein, 5 aa, unidentified
CGVTP

SEQ ID NO: 797982 - protein, 5 aa, unidentified
IGIDL

SEQ ID NO: 797983 - protein, 5 aa, unidentified
LGAAP

SEQ ID NO: 797984 - protein, 5 aa, unidentified
LKLAP

SEQ ID NO: 797985 - protein, 5 aa, unidentified
AGVHP

SEQ ID NO: 797986 - protein, 5 aa, unidentified
CAAAP

SEQ ID NO: 797987 - protein, 5 aa, unidentified
LSLAP

SEQ ID NO: 797988 - protein, 5 aa, unidentified
IGLNP

SEQ ID NO: 797989 - protein, 5 aa, unidentified
SGLGL

SEQ ID NO: 797990 - protein, 5 aa, unidentified
AGMEP

SEQ ID NO: 797991 - protein, 5 aa, unidentified
CGLNL

SEQ ID NO: 797992 - protein, 5 aa, unidentified
LGLYP

SEQ ID NO: 797993 - protein, 5 aa, unidentified
AAVCP

SEQ ID NO: 797994 - protein, 5 aa, unidentified
GGTSP

SEQ ID NO: 797995 - protein, 5 aa, unidentified
VTLCP

SEQ ID NO: 797996 - protein, 5 aa, unidentified
AGIDS

SEQ ID NO: 797997 - protein, 5 aa, unidentified
AGTDP

SEQ ID NO: 797998 - protein, 5 aa, unidentified
AKFSP

SEQ ID NO: 797999 - protein, 5 aa, unidentified
LGMDL

SEQ ID NO: 798000 - protein, 5 aa, unidentified
ACICP

SEQ ID NO: 798001 - protein, 5 aa, unidentified
AGLDT

SEQ ID NO: 798002 - protein, 5 aa, unidentified
IGVVP

SEQ ID NO: 798003 - protein, 5 aa, unidentified
CGSAP

SEQ ID NO: 798004 - protein, 5 aa, unidentified
GGLCP

SEQ ID NO: 798005 - protein, 5 aa, unidentified
AGFDP

SEQ ID NO: 798006 - protein, 5 aa, unidentified
CGIVP

SEQ ID NO: 798007 - protein, 5 aa, unidentified
TGAAP

SEQ ID NO: 798008 - protein, 5 aa, unidentified
VGLDL

SEQ ID NO: 798009 - protein, 5 aa, unidentified
VTLAP

SEQ ID NO: 798010 - protein, 5 aa, unidentified
LALAP

SEQ ID NO: 798011 - protein, 5 aa, unidentified
VGIDP

SEQ ID NO: 798012 - protein, 5 aa, unidentified
WGVAP

SEQ ID NO: 798013 - protein, 5 aa, unidentified
AGFNL

SEQ ID NO: 798014 - protein, 5 aa, unidentified
AGLIP

SEQ ID NO: 798015 - protein, 5 aa, unidentified
AKFCP

SEQ ID NO: 798016 - protein, 5 aa, unidentified
LCLSP

SEQ ID NO: 798017 - protein, 5 aa, unidentified
CGFNL

SEQ ID NO: 798018 - protein, 5 aa, unidentified
FGTAP

SEQ ID NO: 798019 - protein, 5 aa, unidentified
LGVTP

SEQ ID NO: 798020 - protein, 5 aa, unidentified
MGLSP

SEQ ID NO: 798021 - protein, 5 aa, unidentified
SGMSP

SEQ ID NO: 798022 - protein, 5 aa, unidentified
GGVCP

SEQ ID NO: 798023 - protein, 5 aa, unidentified
AGFKW

SEQ ID NO: 798024 - protein, 5 aa, unidentified
IGLCP

SEQ ID NO: 798025 - protein, 5 aa, unidentified
AGIDI

SEQ ID NO: 798026 - protein, 52 aa, unidentified
  VARIANT 2: note = Any amino acid
  VARIANT 3: note = Any amino acid
  VARIANT 4: note = Any amino acid
  VARIANT 5: note = Any amino acid
  VARIANT 6: note = Any amino acid
  VARIANT 7: note = Any amino acid
  VARIANT 8: note = Any amino acid
  VARIANT 9: note = Any amino acid
  VARIANT 10: note = Any amino acid
  VARIANT 11: note = Any amino acid
  VARIANT 12: note = Any amino acid
  VARIANT 13: note = Any amino acid
  VARIANT 14: note = Any amino acid
  VARIANT 15: note = Any amino acid
  VARIANT 16: note = Any amino acid
  VARIANT 17: note = Any amino acid
  VARIANT 18: note = Any amino acid
  VARIANT 19: note = Any amino acid
  VARIANT 20: note = Any amino acid
  VARIANT 21: note = Any amino acid
  VARIANT 22: note = Any amino acid
  VARIANT 23: note = Any amino acid
  VARIANT 24: note = Any amino acid
  VARIANT 25: note = Any amino acid
  VARIANT 26: note = Any amino acid
  VARIANT 27: note = Any amino acid
  VARIANT 28: note = Any amino acid
  VARIANT 29: note = Any amino acid
  VARIANT 30: note = Any amino acid
  VARIANT 32: note = Any amino acid
  VARIANT 33: note = Any amino acid
  VARIANT 34: note = Any amino acid
  VARIANT 35: note = Any amino acid
  VARIANT 36: note = Any amino acid
  VARIANT 37: note = Any amino acid
  VARIANT 38: note = Any amino acid
  VARIANT 39: note = S or T
  VARIANT 41: note = Any amino acid
  VARIANT 42: note = Any amino acid
  VARIANT 43: note = Any amino acid
  VARIANT 44: note = Any amino acid
  VARIANT 45: note = Any amino acid
  VARIANT 46: note = Any amino acid
  VARIANT 47: note = Any amino acid
  VARIANT 48: note = Any amino acid
  VARIANT 49: note = Any amino acid
  VARIANT 50: note = Any amino acid
  VARIANT 51: note = Any amino acid
GXXXXXXXXXXXXXXXXXXXXXXXXXXXXXGXXXXXXXXGXXXXXXXXXXXG

SEQ ID NO: 798027 - protein, 52 aa, unidentified
  VARIANT 2: note = Any amino acid
  VARIANT 3: note = Any amino acid
  VARIANT 4: note = Any amino acid
  VARIANT 5: note = Any amino acid
  VARIANT 6: note = Any amino acid
  VARIANT 7: note = Any amino acid
  VARIANT 8: note = Any amino acid
  VARIANT 9: note = Any amino acid
  VARIANT 10: note = Any amino acid
  VARIANT 11: note = Any amino acid
  VARIANT 12: note = Any amino acid
  VARIANT 13: note = Any amino acid
  VARIANT 14: note = Any amino acid
  VARIANT 15: note = Any amino acid
  VARIANT 16: note = Any amino acid
  VARIANT 17: note = Any amino acid
  VARIANT 18: note = Any amino acid
  VARIANT 19: note = Any amino acid
  VARIANT 20: note = Any amino acid
  VARIANT 21: note = Any amino acid
  VARIANT 22: note = Any amino acid
  VARIANT 23: note = Any amino acid
  VARIANT 24: note = Any amino acid
  VARIANT 25: note = Any amino acid
  VARIANT 26: note = Any amino acid
  VARIANT 27: note = Any amino acid
  VARIANT 28: note = Any amino acid
  VARIANT 29: note = Any amino acid
  VARIANT 30: note = Any amino acid
  VARIANT 32: note = Any amino acid
  VARIANT 33: note = Any amino acid
  VARIANT 34: note = Any amino acid
  VARIANT 35: note = Any amino acid
  VARIANT 36: note = Any amino acid
  VARIANT 37: note = Any amino acid
  VARIANT 38: note = Any amino acid
  VARIANT 41: note = Any amino acid
  VARIANT 42: note = Any amino acid
  VARIANT 43: note = Any amino acid
  VARIANT 44: note = Any amino acid
  VARIANT 45: note = Any amino acid
  VARIANT 46: note = Any amino acid
  VARIANT 47: note = Any amino acid
  VARIANT 48: note = Any amino acid
  VARIANT 49: note = Any amino acid
  VARIANT 50: note = Any amino acid
  VARIANT 51: note = Any amino acid
GXXXXXXXXXXXXXXXXXXXXXXXXXXXXXRXXXXXXXSNXXXXXXXXXXXG

SEQ ID NO: 798028 - protein, 52 aa, unidentified
  VARIANT 2: note = Any amino acid
  VARIANT 3: note = Any amino acid
  VARIANT 4: note = Any amino acid
  VARIANT 5: note = Any amino acid
  VARIANT 6: note = Any amino acid
  VARIANT 7: note = Any amino acid
  VARIANT 8: note = Any amino acid
  VARIANT 9: note = Any amino acid
  VARIANT 10: note = Any amino acid
  VARIANT 11: note = Any amino acid
  VARIANT 12: note = Any amino acid
  VARIANT 13: note = Any amino acid
  VARIANT 14: note = Any amino acid
  VARIANT 15: note = Any amino acid
  VARIANT 16: note = Any amino acid
  VARIANT 17: note = Any amino acid
  VARIANT 18: note = Any amino acid
  VARIANT 19: note = Any amino acid
  VARIANT 20: note = Any amino acid
  VARIANT 21: note = Any amino acid
  VARIANT 22: note = Any amino acid
  VARIANT 23: note = Any amino acid
  VARIANT 24: note = Any amino acid
  VARIANT 25: note = Any amino acid
  VARIANT 26: note = Any amino acid
  VARIANT 27: note = Any amino acid
  VARIANT 28: note = Any amino acid
  VARIANT 29: note = Any amino acid
  VARIANT 30: note = Any amino acid
  VARIANT 32: note = Any amino acid
  VARIANT 33: note = Any amino acid
  VARIANT 34: note = Any amino acid
  VARIANT 35: note = Any amino acid
  VARIANT 36: note = Any amino acid
  VARIANT 37: note = Any amino acid
  VARIANT 38: note = Any amino acid
  VARIANT 41: note = Any amino acid
  VARIANT 42: note = Any amino acid
  VARIANT 43: note = Any amino acid
  VARIANT 44: note = Any amino acid
  VARIANT 45: note = Any amino acid
  VARIANT 46: note = Any amino acid
  VARIANT 47: note = Any amino acid
  VARIANT 48: note = Any amino acid
  VARIANT 49: note = Any amino acid
  VARIANT 50: note = Any amino acid
  VARIANT 51: note = Any amino acid
GXXXXXXXXXXXXXXXXXXXXXXXXXXXXXRXXXXXXXSAXXXXXXXXXXXG

SEQ ID NO: 798029 - protein, 52 aa, unidentified
  VARIANT 2: note = Any amino acid
  VARIANT 3: note = Any amino acid
  VARIANT 4: note = Any amino acid
  VARIANT 5: note = Any amino acid
  VARIANT 6: note = Any amino acid
  VARIANT 7: note = Any amino acid
  VARIANT 8: note = Any amino acid
  VARIANT 9: note = Any amino acid
  VARIANT 10: note = Any amino acid
  VARIANT 11: note = Any amino acid
  VARIANT 12: note = Any amino acid
  VARIANT 13: note = Any amino acid
  VARIANT 14: note = Any amino acid
  VARIANT 15: note = Any amino acid
  VARIANT 16: note = Any amino acid
  VARIANT 17: note = Any amino acid
  VARIANT 18: note = Any amino acid
  VARIANT 19: note = Any amino acid
  VARIANT 20: note = Any amino acid
  VARIANT 21: note = Any amino acid
  VARIANT 22: note = Any amino acid
  VARIANT 23: note = Any amino acid
  VARIANT 24: note = Any amino acid
  VARIANT 25: note = Any amino acid
  VARIANT 26: note = Any amino acid
  VARIANT 27: note = Any amino acid
  VARIANT 28: note = Any amino acid
  VARIANT 29: note = Any amino acid
  VARIANT 30: note = Any amino acid
  VARIANT 32: note = Any amino acid
  VARIANT 33: note = Any amino acid
  VARIANT 34: note = Any amino acid
  VARIANT 35: note = Any amino acid
  VARIANT 36: note = Any amino acid
  VARIANT 37: note = Any amino acid
  VARIANT 38: note = Any amino acid
  VARIANT 41: note = Any amino acid
  VARIANT 42: note = Any amino acid
  VARIANT 43: note = Any amino acid
  VARIANT 44: note = Any amino acid
  VARIANT 45: note = Any amino acid
  VARIANT 46: note = Any amino acid
  VARIANT 47: note = Any amino acid
  VARIANT 48: note = Any amino acid
  VARIANT 49: note = Any amino acid
  VARIANT 50: note = Any amino acid
  VARIANT 51: note = Any amino acid
GXXXXXXXXXXXXXXXXXXXXXXXXXXXXXGXXXXXXXSNXXXXXXXXXXXG

SEQ ID NO: 798030 - protein, 52 aa, unidentified
  VARIANT 2: note = Any amino acid
  VARIANT 3: note = Any amino acid
  VARIANT 4: note = Any amino acid
  VARIANT 5: note = Any amino acid
  VARIANT 6: note = Any amino acid
  VARIANT 7: note = Any amino acid
  VARIANT 8: note = Any amino acid
  VARIANT 9: note = Any amino acid
  VARIANT 10: note = Any amino acid
  VARIANT 11: note = Any amino acid
  VARIANT 12: note = Any amino acid
  VARIANT 13: note = Any amino acid
  VARIANT 14: note = Any amino acid
  VARIANT 15: note = Any amino acid
  VARIANT 16: note = Any amino acid
  VARIANT 17: note = Any amino acid
  VARIANT 18: note = Any amino acid
  VARIANT 19: note = Any amino acid
  VARIANT 20: note = Any amino acid
  VARIANT 21: note = Any amino acid
  VARIANT 22: note = Any amino acid
  VARIANT 23: note = Any amino acid
  VARIANT 24: note = Any amino acid
  VARIANT 25: note = Any amino acid
  VARIANT 26: note = Any amino acid
  VARIANT 27: note = Any amino acid
  VARIANT 28: note = Any amino acid
  VARIANT 29: note = Any amino acid
  VARIANT 30: note = Any amino acid
  VARIANT 32: note = Any amino acid
  VARIANT 33: note = Any amino acid
  VARIANT 34: note = Any amino acid
  VARIANT 35: note = Any amino acid
  VARIANT 36: note = Any amino acid
  VARIANT 37: note = Any amino acid
  VARIANT 38: note = Any amino acid
  VARIANT 41: note = Any amino acid
  VARIANT 42: note = Any amino acid
  VARIANT 43: note = Any amino acid
  VARIANT 44: note = Any amino acid
  VARIANT 45: note = Any amino acid
  VARIANT 46: note = Any amino acid
  VARIANT 47: note = Any amino acid
  VARIANT 48: note = Any amino acid
  VARIANT 49: note = Any amino acid
  VARIANT 50: note = Any amino acid
  VARIANT 51: note = Any amino acid
GXXXXXXXXXXXXXXXXXXXXXXXXXXXXXGXXXXXXXSAXXXXXXXXXXXR

SEQ ID NO: 798031 - protein, 52 aa, unidentified
  VARIANT 2: note = Any amino acid
  VARIANT 3: note = Any amino acid
  VARIANT 4: note = Any amino acid
  VARIANT 5: note = Any amino acid
  VARIANT 6: note = Any amino acid
  VARIANT 7: note = Any amino acid
  VARIANT 8: note = Any amino acid
  VARIANT 9: note = Any amino acid
  VARIANT 10: note = Any amino acid
  VARIANT 11: note = Any amino acid
  VARIANT 12: note = Any amino acid
  VARIANT 13: note = Any amino acid
  VARIANT 14: note = Any amino acid
  VARIANT 15: note = Any amino acid
  VARIANT 16: note = Any amino acid
  VARIANT 17: note = Any amino acid
  VARIANT 18: note = Any amino acid
  VARIANT 19: note = Any amino acid
  VARIANT 20: note = Any amino acid
  VARIANT 21: note = Any amino acid
  VARIANT 22: note = Any amino acid
  VARIANT 23: note = Any amino acid
  VARIANT 24: note = Any amino acid
  VARIANT 25: note = Any amino acid
  VARIANT 26: note = Any amino acid
  VARIANT 27: note = Any amino acid
  VARIANT 28: note = Any amino acid
  VARIANT 29: note = Any amino acid
  VARIANT 30: note = Any amino acid
  VARIANT 32: note = Any amino acid
  VARIANT 33: note = Any amino acid
  VARIANT 34: note = Any amino acid
  VARIANT 35: note = Any amino acid
  VARIANT 36: note = Any amino acid
  VARIANT 37: note = Any amino acid
  VARIANT 38: note = Any amino acid
  VARIANT 41: note = Any amino acid
  VARIANT 42: note = Any amino acid
  VARIANT 43: note = Any amino acid
  VARIANT 44: note = Any amino acid
  VARIANT 45: note = Any amino acid
  VARIANT 46: note = Any amino acid
  VARIANT 47: note = Any amino acid
  VARIANT 48: note = Any amino acid
  VARIANT 49: note = Any amino acid
  VARIANT 50: note = Any amino acid
  VARIANT 51: note = Any amino acid
GXXXXXXXXXXXXXXXXXXXXXXXXXXXXXGXXXXXXXTAXXXXXXXXXXXG

SEQ ID NO: 798032 - protein, 52 aa, unidentified
  VARIANT 2: note = Any amino acid
  VARIANT 3: note = Any amino acid
  VARIANT 4: note = Any amino acid
  VARIANT 5: note = Any amino acid
  VARIANT 6: note = Any amino acid
  VARIANT 7: note = Any amino acid
  VARIANT 8: note = Any amino acid
  VARIANT 9: note = Any amino acid
  VARIANT 10: note = Any amino acid
  VARIANT 11: note = Any amino acid
  VARIANT 12: note = Any amino acid
  VARIANT 13: note = Any amino acid
  VARIANT 14: note = Any amino acid
  VARIANT 15: note = Any amino acid
  VARIANT 16: note = Any amino acid
  VARIANT 17: note = Any amino acid
  VARIANT 18: note = Any amino acid
  VARIANT 19: note = Any amino acid
  VARIANT 20: note = Any amino acid
  VARIANT 21: note = Any amino acid
  VARIANT 22: note = Any amino acid
  VARIANT 23: note = Any amino acid
  VARIANT 24: note = Any amino acid
  VARIANT 25: note = Any amino acid
  VARIANT 26: note = Any amino acid
  VARIANT 27: note = Any amino acid
  VARIANT 28: note = Any amino acid
  VARIANT 29: note = Any amino acid
  VARIANT 30: note = Any amino acid
  VARIANT 32: note = Any amino acid
  VARIANT 33: note = Any amino acid
  VARIANT 34: note = Any amino acid
  VARIANT 35: note = Any amino acid
  VARIANT 36: note = Any amino acid
  VARIANT 37: note = Any amino acid
  VARIANT 38: note = Any amino acid
  VARIANT 41: note = Any amino acid
  VARIANT 42: note = Any amino acid
  VARIANT 43: note = Any amino acid
  VARIANT 44: note = Any amino acid
  VARIANT 45: note = Any amino acid
  VARIANT 46: note = Any amino acid
  VARIANT 47: note = Any amino acid
  VARIANT 48: note = Any amino acid
  VARIANT 49: note = Any amino acid
  VARIANT 50: note = Any amino acid
  VARIANT 51: note = Any amino acid
GXXXXXXXXXXXXXXXXXXXXXXXXXXXXXRXXXXXXXSGXXXXXXXXXXXG

SEQ ID NO: 798033 - protein, 51 aa, unidentified
  VARIANT 2: note = Any amino acid
  VARIANT 3: note = Any amino acid
  VARIANT 4: note = Any amino acid
  VARIANT 5: note = Any amino acid
  VARIANT 6: note = Any amino acid
  VARIANT 7: note = Any amino acid
  VARIANT 8: note = Any amino acid
  VARIANT 9: note = Any amino acid
  VARIANT 10: note = Any amino acid
  VARIANT 11: note = Any amino acid
  VARIANT 12: note = Any amino acid
  VARIANT 13: note = Any amino acid
  VARIANT 14: note = Any amino acid
  VARIANT 15: note = Any amino acid
  VARIANT 16: note = Any amino acid
  VARIANT 17: note = Any amino acid
  VARIANT 18: note = Any amino acid
  VARIANT 19: note = Any amino acid
  VARIANT 20: note = Any amino acid
  VARIANT 21: note = Any amino acid
  VARIANT 22: note = Any amino acid
  VARIANT 23: note = Any amino acid
  VARIANT 24: note = Any amino acid
  VARIANT 25: note = Any amino acid
  VARIANT 26: note = Any amino acid
  VARIANT 27: note = Any amino acid
  VARIANT 28: note = Any amino acid
  VARIANT 29: note = Any amino acid
  VARIANT 31: note = Any amino acid
  VARIANT 32: note = Any amino acid
  VARIANT 33: note = Any amino acid
  VARIANT 34: note = Any amino acid
  VARIANT 35: note = Any amino acid
  VARIANT 36: note = Any amino acid
  VARIANT 37: note = Any amino acid
  VARIANT 40: note = Any amino acid
  VARIANT 41: note = Any amino acid
  VARIANT 42: note = Any amino acid
  VARIANT 43: note = Any amino acid
  VARIANT 44: note = Any amino acid
  VARIANT 45: note = Any amino acid
  VARIANT 46: note = Any amino acid
  VARIANT 47: note = Any amino acid
  VARIANT 48: note = Any amino acid
  VARIANT 49: note = Any amino acid
  VARIANT 50: note = Any amino acid
GXXXXXXXXXXXXXXXXXXXXXXXXXXXXGXXXXXXXTGXXXXXXXXXXXG

SEQ ID NO: 798034 - protein, 52 aa, unidentified
  VARIANT 2: note = Any amino acid
  VARIANT 3: note = Any amino acid
  VARIANT 4: note = Any amino acid
  VARIANT 5: note = Any amino acid
  VARIANT 6: note = Any amino acid
  VARIANT 7: note = Any amino acid
  VARIANT 8: note = Any amino acid
  VARIANT 9: note = Any amino acid
  VARIANT 10: note = Any amino acid
  VARIANT 11: note = Any amino acid
  VARIANT 12: note = Any amino acid
  VARIANT 13: note = Any amino acid
  VARIANT 14: note = Any amino acid
  VARIANT 15: note = Any amino acid
  VARIANT 16: note = Any amino acid
  VARIANT 17: note = Any amino acid
  VARIANT 18: note = Any amino acid
  VARIANT 19: note = Any amino acid
  VARIANT 20: note = Any amino acid
  VARIANT 21: note = Any amino acid
  VARIANT 22: note = Any amino acid
  VARIANT 23: note = Any amino acid
  VARIANT 24: note = Any amino acid
  VARIANT 25: note = Any amino acid
  VARIANT 26: note = Any amino acid
  VARIANT 27: note = Any amino acid
  VARIANT 28: note = Any amino acid
  VARIANT 29: note = Any amino acid
  VARIANT 30: note = Any amino acid
  VARIANT 32: note = Any amino acid
  VARIANT 33: note = Any amino acid
  VARIANT 34: note = Any amino acid
  VARIANT 35: note = Any amino acid
  VARIANT 36: note = Any amino acid
  VARIANT 37: note = Any amino acid
  VARIANT 38: note = Any amino acid
  VARIANT 41: note = Any amino acid
  VARIANT 42: note = Any amino acid
  VARIANT 43: note = Any amino acid
  VARIANT 44: note = Any amino acid
  VARIANT 45: note = Any amino acid
  VARIANT 46: note = Any amino acid
  VARIANT 47: note = Any amino acid
  VARIANT 48: note = Any amino acid
  VARIANT 49: note = Any amino acid
  VARIANT 50: note = Any amino acid
  VARIANT 51: note = Any amino acid
GXXXXXXXXXXXXXXXXXXXXXXXXXXXXXGXXXXXXXSGXXXXXXXXXXXK

SEQ ID NO: 798035 - protein, 52 aa, unidentified
  VARIANT 2: note = Any amino acid
  VARIANT 3: note = Any amino acid
  VARIANT 4: note = Any amino acid
  VARIANT 5: note = Any amino acid
  VARIANT 6: note = Any amino acid
  VARIANT 7: note = Any amino acid
  VARIANT 8: note = Any amino acid
  VARIANT 9: note = Any amino acid
  VARIANT 10: note = Any amino acid
  VARIANT 11: note = Any amino acid
  VARIANT 12: note = Any amino acid
  VARIANT 13: note = Any amino acid
  VARIANT 14: note = Any amino acid
  VARIANT 15: note = Any amino acid
  VARIANT 16: note = Any amino acid
  VARIANT 17: note = Any amino acid
  VARIANT 18: note = Any amino acid
  VARIANT 19: note = Any amino acid
  VARIANT 20: note = Any amino acid
  VARIANT 21: note = Any amino acid
  VARIANT 22: note = Any amino acid
  VARIANT 23: note = Any amino acid
  VARIANT 24: note = Any amino acid
  VARIANT 25: note = Any amino acid
  VARIANT 26: note = Any amino acid
  VARIANT 27: note = Any amino acid
  VARIANT 28: note = Any amino acid
  VARIANT 29: note = Any amino acid
  VARIANT 30: note = Any amino acid
  VARIANT 32: note = Any amino acid
  VARIANT 33: note = Any amino acid
  VARIANT 34: note = Any amino acid
  VARIANT 35: note = Any amino acid
  VARIANT 36: note = Any amino acid
  VARIANT 37: note = Any amino acid
  VARIANT 38: note = Any amino acid
  VARIANT 41: note = Any amino acid
  VARIANT 42: note = Any amino acid
  VARIANT 43: note = Any amino acid
  VARIANT 44: note = Any amino acid
  VARIANT 45: note = Any amino acid
  VARIANT 46: note = Any amino acid
  VARIANT 47: note = Any amino acid
  VARIANT 48: note = Any amino acid
  VARIANT 49: note = Any amino acid
  VARIANT 50: note = Any amino acid
  VARIANT 51: note = Any amino acid
GXXXXXXXXXXXXXXXXXXXXXXXXXXXXXRXXXXXXXSDXXXXXXXXXXXG

SEQ ID NO: 798036 - protein, 53 aa, unidentified
  VARIANT 2: note = Any amino acid
  VARIANT 3: note = Any amino acid
  VARIANT 4: note = Any amino acid
  VARIANT 5: note = Any amino acid
  VARIANT 6: note = Any amino acid
  VARIANT 7: note = Any amino acid
  VARIANT 8: note = Any amino acid
  VARIANT 9: note = Any amino acid
  VARIANT 10: note = Any amino acid
  VARIANT 11: note = Any amino acid
  VARIANT 12: note = Any amino acid
  VARIANT 13: note = Any amino acid
  VARIANT 14: note = Any amino acid
  VARIANT 15: note = Any amino acid
  VARIANT 16: note = Any amino acid
  VARIANT 17: note = Any amino acid
  VARIANT 18: note = Any amino acid
  VARIANT 19: note = Any amino acid
  VARIANT 20: note = Any amino acid
  VARIANT 21: note = Any amino acid
  VARIANT 22: note = Any amino acid
  VARIANT 23: note = Any amino acid
  VARIANT 24: note = Any amino acid
  VARIANT 25: note = Any amino acid
  VARIANT 26: note = Any amino acid
  VARIANT 27: note = Any amino acid
  VARIANT 28: note = Any amino acid
  VARIANT 29: note = Any amino acid
  VARIANT 30: note = Any amino acid
  VARIANT 32: note = Any amino acid
  VARIANT 33: note = Any amino acid
  VARIANT 34: note = Any amino acid
  VARIANT 35: note = Any amino acid
  VARIANT 36: note = Any amino acid
  VARIANT 37: note = Any amino acid
  VARIANT 38: note = Any amino acid
  VARIANT 41: note = Any amino acid
  VARIANT 42: note = Any amino acid
  VARIANT 43: note = Any amino acid
  VARIANT 44: note = Any amino acid
  VARIANT 45: note = Any amino acid
  VARIANT 46: note = Any amino acid
  VARIANT 47: note = Any amino acid
  VARIANT 48: note = Any amino acid
  VARIANT 49: note = Any amino acid
  VARIANT 50: note = Any amino acid
  VARIANT 51: note = Any amino acid
  VARIANT 52: note = Any amino acid
GXXXXXXXXXXXXXXXXXXXXXXXXXXXXXRXXXXXXXSDXXXXXXXXXXXXG

SEQ ID NO: 798037 - protein, 52 aa, unidentified
  VARIANT 2: note = Any amino acid
  VARIANT 3: note = Any amino acid
  VARIANT 4: note = Any amino acid
  VARIANT 5: note = Any amino acid
  VARIANT 6: note = Any amino acid
  VARIANT 7: note = Any amino acid
  VARIANT 8: note = Any amino acid
  VARIANT 9: note = Any amino acid
  VARIANT 10: note = Any amino acid
  VARIANT 11: note = Any amino acid
  VARIANT 12: note = Any amino acid
  VARIANT 13: note = Any amino acid
  VARIANT 14: note = Any amino acid
  VARIANT 15: note = Any amino acid
  VARIANT 16: note = Any amino acid
  VARIANT 17: note = Any amino acid
  VARIANT 18: note = Any amino acid
  VARIANT 19: note = Any amino acid
  VARIANT 20: note = Any amino acid
  VARIANT 21: note = Any amino acid
  VARIANT 22: note = Any amino acid
  VARIANT 23: note = Any amino acid
  VARIANT 24: note = Any amino acid
  VARIANT 25: note = Any amino acid
  VARIANT 26: note = Any amino acid
  VARIANT 27: note = Any amino acid
  VARIANT 28: note = Any amino acid
  VARIANT 29: note = Any amino acid
  VARIANT 30: note = Any amino acid
  VARIANT 32: note = Any amino acid
  VARIANT 33: note = Any amino acid
  VARIANT 34: note = Any amino acid
  VARIANT 35: note = Any amino acid
  VARIANT 36: note = Any amino acid
  VARIANT 37: note = Any amino acid
  VARIANT 38: note = Any amino acid
  VARIANT 41: note = Any amino acid
  VARIANT 42: note = Any amino acid
  VARIANT 43: note = Any amino acid
  VARIANT 44: note = Any amino acid
  VARIANT 45: note = Any amino acid
  VARIANT 46: note = Any amino acid
  VARIANT 47: note = Any amino acid
  VARIANT 48: note = Any amino acid
  VARIANT 49: note = Any amino acid
  VARIANT 50: note = Any amino acid
  VARIANT 51: note = Any amino acid
GXXXXXXXXXXXXXXXXXXXXXXXXXXXXXGXXXXXXXSAXXXXXXXXXXXC

SEQ ID NO: 798038 - protein, 53 aa, unidentified
  VARIANT 2: note = Any amino acid
  VARIANT 3: note = Any amino acid
  VARIANT 4: note = Any amino acid
  VARIANT 5: note = Any amino acid
  VARIANT 6: note = Any amino acid
  VARIANT 7: note = Any amino acid
  VARIANT 8: note = Any amino acid
  VARIANT 9: note = Any amino acid
  VARIANT 10: note = Any amino acid
  VARIANT 11: note = Any amino acid
  VARIANT 12: note = Any amino acid
  VARIANT 13: note = Any amino acid
  VARIANT 14: note = Any amino acid
  VARIANT 15: note = Any amino acid
  VARIANT 16: note = Any amino acid
  VARIANT 17: note = Any amino acid
  VARIANT 18: note = Any amino acid
  VARIANT 19: note = Any amino acid
  VARIANT 20: note = Any amino acid
  VARIANT 21: note = Any amino acid
  VARIANT 22: note = Any amino acid
  VARIANT 23: note = Any amino acid
  VARIANT 24: note = Any amino acid
  VARIANT 25: note = Any amino acid
  VARIANT 26: note = Any amino acid
  VARIANT 27: note = Any amino acid
  VARIANT 28: note = Any amino acid
  VARIANT 29: note = Any amino acid
  VARIANT 30: note = Any amino acid
  VARIANT 32: note = Any amino acid
  VARIANT 33: note = Any amino acid
  VARIANT 34: note = Any amino acid
  VARIANT 35: note = Any amino acid
  VARIANT 36: note = Any amino acid
  VARIANT 37: note = Any amino acid
  VARIANT 38: note = Any amino acid
  VARIANT 41: note = Any amino acid
  VARIANT 42: note = Any amino acid
  VARIANT 43: note = Any amino acid
  VARIANT 44: note = Any amino acid
  VARIANT 45: note = Any amino acid
  VARIANT 46: note = Any amino acid
  VARIANT 47: note = Any amino acid
  VARIANT 48: note = Any amino acid
  VARIANT 49: note = Any amino acid
  VARIANT 50: note = Any amino acid
  VARIANT 51: note = Any amino acid
  VARIANT 52: note = Any amino acid
FXXXXXXXXXXXXXXXXXXXXXXXXXXXXXGXXXXXXXSAXXXXXXXXXXXXR

SEQ ID NO: 798039 - protein, 58 aa, unidentified
  VARIANT 2: note = Any amino acid
  VARIANT 3: note = Any amino acid
  VARIANT 4: note = Any amino acid
  VARIANT 5: note = Any amino acid
  VARIANT 6: note = Any amino acid
  VARIANT 7: note = Any amino acid
  VARIANT 8: note = Any amino acid
  VARIANT 9: note = Any amino acid
  VARIANT 10: note = Any amino acid
  VARIANT 11: note = Any amino acid
  VARIANT 12: note = Any amino acid
  VARIANT 13: note = Any amino acid
  VARIANT 14: note = Any amino acid
  VARIANT 15: note = Any amino acid
  VARIANT 16: note = Any amino acid
  VARIANT 17: note = Any amino acid
  VARIANT 18: note = Any amino acid
  VARIANT 19: note = Any amino acid
  VARIANT 20: note = Any amino acid
  VARIANT 21: note = Any amino acid
  VARIANT 22: note = Any amino acid
  VARIANT 23: note = Any amino acid
  VARIANT 24: note = Any amino acid
  VARIANT 25: note = Any amino acid
  VARIANT 26: note = Any amino acid
  VARIANT 27: note = Any amino acid
  VARIANT 28: note = Any amino acid
  VARIANT 29: note = Any amino acid
  VARIANT 30: note = Any amino acid
  VARIANT 32: note = Any amino acid
  VARIANT 33: note = Any amino acid
  VARIANT 34: note = Any amino acid
  VARIANT 35: note = Any amino acid
  VARIANT 36: note = Any amino acid
  VARIANT 37: note = Any amino acid
  VARIANT 38: note = Any amino acid
  VARIANT 41: note = Any amino acid
  VARIANT 42: note = Any amino acid
  VARIANT 43: note = Any amino acid
  VARIANT 44: note = Any amino acid
  VARIANT 45: note = Any amino acid
  VARIANT 46: note = Any amino acid
  VARIANT 47: note = Any amino acid
  VARIANT 48: note = Any amino acid
  VARIANT 49: note = Any amino acid
  VARIANT 50: note = Any amino acid
  VARIANT 51: note = Any amino acid
  VARIANT 52: note = Any amino acid
  VARIANT 53: note = Any amino acid
  VARIANT 54: note = Any amino acid
  VARIANT 55: note = Any amino acid
  VARIANT 56: note = Any amino acid
  VARIANT 57: note = Any amino acid
GXXXXXXXXXXXXXXXXXXXXXXXXXXXXXGXXXXXXXSGXXXXXXXXXXXXXXXXXV

SEQ ID NO: 798040 - protein, 52 aa, unidentified
  VARIANT 2: note = Any amino acid
  VARIANT 3: note = Any amino acid
  VARIANT 4: note = Any amino acid
  VARIANT 5: note = Any amino acid
  VARIANT 6: note = Any amino acid
  VARIANT 7: note = Any amino acid
  VARIANT 8: note = Any amino acid
  VARIANT 9: note = Any amino acid
  VARIANT 10: note = Any amino acid
  VARIANT 11: note = Any amino acid
  VARIANT 12: note = Any amino acid
  VARIANT 13: note = Any amino acid
  VARIANT 14: note = Any amino acid
  VARIANT 15: note = Any amino acid
  VARIANT 16: note = Any amino acid
  VARIANT 17: note = Any amino acid
  VARIANT 18: note = Any amino acid
  VARIANT 19: note = Any amino acid
  VARIANT 20: note = Any amino acid
  VARIANT 21: note = Any amino acid
  VARIANT 22: note = Any amino acid
  VARIANT 23: note = Any amino acid
  VARIANT 24: note = Any amino acid
  VARIANT 25: note = Any amino acid
  VARIANT 26: note = Any amino acid
  VARIANT 27: note = Any amino acid
  VARIANT 28: note = Any amino acid
  VARIANT 29: note = Any amino acid
  VARIANT 30: note = Any amino acid
  VARIANT 32: note = Any amino acid
  VARIANT 33: note = Any amino acid
  VARIANT 34: note = Any amino acid
  VARIANT 35: note = Any amino acid
  VARIANT 36: note = Any amino acid
  VARIANT 37: note = Any amino acid
  VARIANT 38: note = Any amino acid
  VARIANT 41: note = Any amino acid
  VARIANT 42: note = Any amino acid
  VARIANT 43: note = Any amino acid
  VARIANT 44: note = Any amino acid
  VARIANT 45: note = Any amino acid
  VARIANT 46: note = Any amino acid
  VARIANT 47: note = Any amino acid
  VARIANT 48: note = Any amino acid
  VARIANT 49: note = Any amino acid
  VARIANT 50: note = Any amino acid
  VARIANT 51: note = Any amino acid
GXXXXXXXXXXXXXXXXXXXXXXXXXXXXXGXXXXXXXSGXXXXXXXXXXXH

SEQ ID NO: 798041 - protein, 52 aa, unidentified
  VARIANT 2: note = Any amino acid
  VARIANT 3: note = Any amino acid
  VARIANT 4: note = Any amino acid
  VARIANT 5: note = Any amino acid
  VARIANT 6: note = Any amino acid
  VARIANT 7: note = Any amino acid
  VARIANT 8: note = Any amino acid
  VARIANT 9: note = Any amino acid
  VARIANT 10: note = Any amino acid
  VARIANT 11: note = Any amino acid
  VARIANT 12: note = Any amino acid
  VARIANT 13: note = Any amino acid
  VARIANT 14: note = Any amino acid
  VARIANT 15: note = Any amino acid
  VARIANT 16: note = Any amino acid
  VARIANT 17: note = Any amino acid
  VARIANT 18: note = Any amino acid
  VARIANT 19: note = Any amino acid
  VARIANT 20: note = Any amino acid
  VARIANT 21: note = Any amino acid
  VARIANT 22: note = Any amino acid
  VARIANT 23: note = Any amino acid
  VARIANT 24: note = Any amino acid
  VARIANT 25: note = Any amino acid
  VARIANT 26: note = Any amino acid
  VARIANT 27: note = Any amino acid
  VARIANT 28: note = Any amino acid
  VARIANT 29: note = Any amino acid
  VARIANT 30: note = Any amino acid
  VARIANT 32: note = Any amino acid
  VARIANT 33: note = Any amino acid
  VARIANT 34: note = Any amino acid
  VARIANT 35: note = Any amino acid
  VARIANT 36: note = Any amino acid
  VARIANT 37: note = Any amino acid
  VARIANT 38: note = Any amino acid
  VARIANT 41: note = Any amino acid
  VARIANT 42: note = Any amino acid
  VARIANT 43: note = Any amino acid
  VARIANT 44: note = Any amino acid
  VARIANT 45: note = Any amino acid
  VARIANT 46: note = Any amino acid
  VARIANT 47: note = Any amino acid
  VARIANT 48: note = Any amino acid
  VARIANT 49: note = Any amino acid
  VARIANT 50: note = Any amino acid
  VARIANT 51: note = Any amino acid
GXXXXXXXXXXXXXXXXXXXXXXXXXXXXXRXXXXXXXTNXXXXXXXXXXXG

SEQ ID NO: 798042 - protein, 52 aa, unidentified
  VARIANT 2: note = Any amino acid
  VARIANT 3: note = Any amino acid
  VARIANT 4: note = Any amino acid
  VARIANT 5: note = Any amino acid
  VARIANT 6: note = Any amino acid
  VARIANT 7: note = Any amino acid
  VARIANT 8: note = Any amino acid
  VARIANT 9: note = Any amino acid
  VARIANT 10: note = Any amino acid
  VARIANT 11: note = Any amino acid
  VARIANT 12: note = Any amino acid
  VARIANT 13: note = Any amino acid
  VARIANT 14: note = Any amino acid
  VARIANT 15: note = Any amino acid
  VARIANT 16: note = Any amino acid
  VARIANT 17: note = Any amino acid
  VARIANT 18: note = Any amino acid
  VARIANT 19: note = Any amino acid
  VARIANT 20: note = Any amino acid
  VARIANT 21: note = Any amino acid
  VARIANT 22: note = Any amino acid
  VARIANT 23: note = Any amino acid
  VARIANT 24: note = Any amino acid
  VARIANT 25: note = Any amino acid
  VARIANT 26: note = Any amino acid
  VARIANT 27: note = Any amino acid
  VARIANT 28: note = Any amino acid
  VARIANT 29: note = Any amino acid
  VARIANT 30: note = Any amino acid
  VARIANT 32: note = Any amino acid
  VARIANT 33: note = Any amino acid
  VARIANT 34: note = Any amino acid
  VARIANT 35: note = Any amino acid
  VARIANT 36: note = Any amino acid
  VARIANT 37: note = Any amino acid
  VARIANT 38: note = Any amino acid
  VARIANT 41: note = Any amino acid
  VARIANT 42: note = Any amino acid
  VARIANT 43: note = Any amino acid
  VARIANT 44: note = Any amino acid
  VARIANT 45: note = Any amino acid
  VARIANT 46: note = Any amino acid
  VARIANT 47: note = Any amino acid
  VARIANT 48: note = Any amino acid
  VARIANT 49: note = Any amino acid
  VARIANT 50: note = Any amino acid
  VARIANT 51: note = Any amino acid
SXXXXXXXXXXXXXXXXXXXXXXXXXXXXXGXXXXXXXTAXXXXXXXXXXXG

SEQ ID NO: 798043 - protein, 53 aa, unidentified
  VARIANT 2: note = Any amino acid
  VARIANT 3: note = Any amino acid
  VARIANT 4: note = Any amino acid
  VARIANT 5: note = Any amino acid
  VARIANT 6: note = Any amino acid
  VARIANT 7: note = Any amino acid
  VARIANT 8: note = Any amino acid
  VARIANT 9: note = Any amino acid
  VARIANT 10: note = Any amino acid
  VARIANT 11: note = Any amino acid
  VARIANT 12: note = Any amino acid
  VARIANT 13: note = Any amino acid
  VARIANT 14: note = Any amino acid
  VARIANT 15: note = Any amino acid
  VARIANT 16: note = Any amino acid
  VARIANT 17: note = Any amino acid
  VARIANT 18: note = Any amino acid
  VARIANT 19: note = Any amino acid
  VARIANT 20: note = Any amino acid
  VARIANT 21: note = Any amino acid
  VARIANT 22: note = Any amino acid
  VARIANT 23: note = Any amino acid
  VARIANT 24: note = Any amino acid
  VARIANT 25: note = Any amino acid
  VARIANT 26: note = Any amino acid
  VARIANT 27: note = Any amino acid
  VARIANT 28: note = Any amino acid
  VARIANT 29: note = Any amino acid
  VARIANT 30: note = Any amino acid
  VARIANT 32: note = Any amino acid
  VARIANT 33: note = Any amino acid
  VARIANT 34: note = Any amino acid
  VARIANT 35: note = Any amino acid
  VARIANT 36: note = Any amino acid
  VARIANT 37: note = Any amino acid
  VARIANT 38: note = Any amino acid
  VARIANT 41: note = Any amino acid
  VARIANT 42: note = Any amino acid
  VARIANT 43: note = Any amino acid
  VARIANT 44: note = Any amino acid
  VARIANT 45: note = Any amino acid
  VARIANT 46: note = Any amino acid
  VARIANT 47: note = Any amino acid
  VARIANT 48: note = Any amino acid
  VARIANT 49: note = Any amino acid
  VARIANT 50: note = Any amino acid
  VARIANT 51: note = Any amino acid
  VARIANT 52: note = Any amino acid
SXXXXXXXXXXXXXXXXXXXXXXXXXXXXXGXXXXXXXSAXXXXXXXXXXXXK

SEQ ID NO: 798044 - protein, 56 aa, unidentified
  VARIANT 2: note = Any amino acid
  VARIANT 3: note = Any amino acid
  VARIANT 4: note = Any amino acid
  VARIANT 5: note = Any amino acid
  VARIANT 6: note = Any amino acid
  VARIANT 7: note = Any amino acid
  VARIANT 8: note = Any amino acid
  VARIANT 9: note = Any amino acid
  VARIANT 10: note = Any amino acid
  VARIANT 11: note = Any amino acid
  VARIANT 12: note = Any amino acid
  VARIANT 13: note = Any amino acid
  VARIANT 14: note = Any amino acid
  VARIANT 15: note = Any amino acid
  VARIANT 16: note = Any amino acid
  VARIANT 17: note = Any amino acid
  VARIANT 18: note = Any amino acid
  VARIANT 19: note = Any amino acid
  VARIANT 20: note = Any amino acid
  VARIANT 21: note = Any amino acid
  VARIANT 22: note = Any amino acid
  VARIANT 23: note = Any amino acid
  VARIANT 24: note = Any amino acid
  VARIANT 25: note = Any amino acid
  VARIANT 26: note = Any amino acid
  VARIANT 27: note = Any amino acid
  VARIANT 28: note = Any amino acid
  VARIANT 29: note = Any amino acid
  VARIANT 30: note = Any amino acid
  VARIANT 32: note = Any amino acid
  VARIANT 33: note = Any amino acid
  VARIANT 34: note = Any amino acid
  VARIANT 35: note = Any amino acid
  VARIANT 36: note = Any amino acid
  VARIANT 37: note = Any amino acid
  VARIANT 38: note = Any amino acid
  VARIANT 41: note = Any amino acid
  VARIANT 42: note = Any amino acid
  VARIANT 43: note = Any amino acid
  VARIANT 44: note = Any amino acid
  VARIANT 45: note = Any amino acid
  VARIANT 46: note = Any amino acid
  VARIANT 47: note = Any amino acid
  VARIANT 48: note = Any amino acid
  VARIANT 49: note = Any amino acid
  VARIANT 50: note = Any amino acid
  VARIANT 51: note = Any amino acid
  VARIANT 52: note = Any amino acid
  VARIANT 53: note = Any amino acid
  VARIANT 54: note = Any amino acid
  VARIANT 55: note = Any amino acid
GXXXXXXXXXXXXXXXXXXXXXXXXXXXXXLXXXXXXXSGXXXXXXXXXXXXXXXG

SEQ ID NO: 798045 - protein, 55 aa, unidentified
  VARIANT 2: note = Any amino acid
  VARIANT 3: note = Any amino acid
  VARIANT 4: note = Any amino acid
  VARIANT 5: note = Any amino acid
  VARIANT 6: note = Any amino acid
  VARIANT 7: note = Any amino acid
  VARIANT 8: note = Any amino acid
  VARIANT 9: note = Any amino acid
  VARIANT 10: note = Any amino acid
  VARIANT 11: note = Any amino acid
  VARIANT 12: note = Any amino acid
  VARIANT 13: note = Any amino acid
  VARIANT 14: note = Any amino acid
  VARIANT 15: note = Any amino acid
  VARIANT 16: note = Any amino acid
  VARIANT 17: note = Any amino acid
  VARIANT 18: note = Any amino acid
  VARIANT 19: note = Any amino acid
  VARIANT 20: note = Any amino acid
  VARIANT 21: note = Any amino acid
  VARIANT 22: note = Any amino acid
  VARIANT 23: note = Any amino acid
  VARIANT 24: note = Any amino acid
  VARIANT 25: note = Any amino acid
  VARIANT 26: note = Any amino acid
  VARIANT 27: note = Any amino acid
  VARIANT 28: note = Any amino acid
  VARIANT 29: note = Any amino acid
  VARIANT 30: note = Any amino acid
  VARIANT 31: note = Any amino acid
  VARIANT 32: note = Any amino acid
  VARIANT 34: note = Any amino acid
  VARIANT 35: note = Any amino acid
  VARIANT 36: note = Any amino acid
  VARIANT 37: note = Any amino acid
  VARIANT 38: note = Any amino acid
  VARIANT 39: note = Any amino acid
  VARIANT 40: note = Any amino acid
  VARIANT 43: note = Any amino acid
  VARIANT 44: note = Any amino acid
  VARIANT 45: note = Any amino acid
  VARIANT 46: note = Any amino acid
  VARIANT 47: note = Any amino acid
  VARIANT 48: note = Any amino acid
  VARIANT 49: note = Any amino acid
  VARIANT 50: note = Any amino acid
  VARIANT 51: note = Any amino acid
  VARIANT 52: note = Any amino acid
  VARIANT 53: note = Any amino acid
  VARIANT 54: note = Any amino acid
GXXXXXXXXXXXXXXXXXXXXXXXXXXXXXXXGXXXXXXXSGXXXXXXXXXXXXK

SEQ ID NO: 798046 - protein, 52 aa, unidentified
  VARIANT 2: note = Any amino acid
  VARIANT 3: note = Any amino acid
  VARIANT 4: note = Any amino acid
  VARIANT 5: note = Any amino acid
  VARIANT 6: note = Any amino acid
  VARIANT 7: note = Any amino acid
  VARIANT 8: note = Any amino acid
  VARIANT 9: note = Any amino acid
  VARIANT 10: note = Any amino acid
  VARIANT 11: note = Any amino acid
  VARIANT 12: note = Any amino acid
  VARIANT 13: note = Any amino acid
  VARIANT 14: note = Any amino acid
  VARIANT 15: note = Any amino acid
  VARIANT 16: note = Any amino acid
  VARIANT 17: note = Any amino acid
  VARIANT 18: note = Any amino acid
  VARIANT 19: note = Any amino acid
  VARIANT 20: note = Any amino acid
  VARIANT 21: note = Any amino acid
  VARIANT 22: note = Any amino acid
  VARIANT 23: note = Any amino acid
  VARIANT 24: note = Any amino acid
  VARIANT 25: note = Any amino acid
  VARIANT 26: note = Any amino acid
  VARIANT 27: note = Any amino acid
  VARIANT 28: note = Any amino acid
  VARIANT 29: note = Any amino acid
  VARIANT 30: note = Any amino acid
  VARIANT 32: note = Any amino acid
  VARIANT 33: note = Any amino acid
  VARIANT 34: note = Any amino acid
  VARIANT 35: note = Any amino acid
  VARIANT 36: note = Any amino acid
  VARIANT 37: note = Any amino acid
  VARIANT 38: note = Any amino acid
  VARIANT 41: note = Any amino acid
  VARIANT 42: note = Any amino acid
  VARIANT 43: note = Any amino acid
  VARIANT 44: note = Any amino acid
  VARIANT 45: note = Any amino acid
  VARIANT 46: note = Any amino acid
  VARIANT 47: note = Any amino acid
  VARIANT 48: note = Any amino acid
  VARIANT 49: note = Any amino acid
  VARIANT 50: note = Any amino acid
  VARIANT 51: note = Any amino acid
AXXXXXXXXXXXXXXXXXXXXXXXXXXXXXGXXXXXXXSAXXXXXXXXXXXR

SEQ ID NO: 798047 - protein, 51 aa, unidentified
  VARIANT 2: note = Any amino acid
  VARIANT 3: note = Any amino acid
  VARIANT 4: note = Any amino acid
  VARIANT 5: note = Any amino acid
  VARIANT 6: note = Any amino acid
  VARIANT 7: note = Any amino acid
  VARIANT 8: note = Any amino acid
  VARIANT 9: note = Any amino acid
  VARIANT 10: note = Any amino acid
  VARIANT 11: note = Any amino acid
  VARIANT 12: note = Any amino acid
  VARIANT 13: note = Any amino acid
  VARIANT 14: note = Any amino acid
  VARIANT 15: note = Any amino acid
  VARIANT 16: note = Any amino acid
  VARIANT 17: note = Any amino acid
  VARIANT 18: note = Any amino acid
  VARIANT 19: note = Any amino acid
  VARIANT 20: note = Any amino acid
  VARIANT 21: note = Any amino acid
  VARIANT 22: note = Any amino acid
  VARIANT 23: note = Any amino acid
  VARIANT 24: note = Any amino acid
  VARIANT 25: note = Any amino acid
  VARIANT 26: note = Any amino acid
  VARIANT 27: note = Any amino acid
  VARIANT 28: note = Any amino acid
  VARIANT 29: note = Any amino acid
  VARIANT 30: note = Any amino acid
  VARIANT 32: note = Any amino acid
  VARIANT 33: note = Any amino acid
  VARIANT 34: note = Any amino acid
  VARIANT 35: note = Any amino acid
  VARIANT 36: note = Any amino acid
  VARIANT 37: note = Any amino acid
  VARIANT 38: note = Any amino acid
  VARIANT 41: note = Any amino acid
  VARIANT 42: note = Any amino acid
  VARIANT 43: note = Any amino acid
  VARIANT 44: note = Any amino acid
  VARIANT 45: note = Any amino acid
  VARIANT 46: note = Any amino acid
  VARIANT 47: note = Any amino acid
  VARIANT 48: note = Any amino acid
  VARIANT 49: note = Any amino acid
  VARIANT 50: note = Any amino acid
GXXXXXXXXXXXXXXXXXXXXXXXXXXXXXRXXXXXXXSGXXXXXXXXXXG

SEQ ID NO: 798048 - protein, 52 aa, unidentified
  VARIANT 2: note = Any amino acid
  VARIANT 3: note = Any amino acid
  VARIANT 4: note = Any amino acid
  VARIANT 5: note = Any amino acid
  VARIANT 6: note = Any amino acid
  VARIANT 7: note = Any amino acid
  VARIANT 8: note = Any amino acid
  VARIANT 9: note = Any amino acid
  VARIANT 10: note = Any amino acid
  VARIANT 11: note = Any amino acid
  VARIANT 12: note = Any amino acid
  VARIANT 13: note = Any amino acid
  VARIANT 14: note = Any amino acid
  VARIANT 15: note = Any amino acid
  VARIANT 16: note = Any amino acid
  VARIANT 17: note = Any amino acid
  VARIANT 18: note = Any amino acid
  VARIANT 19: note = Any amino acid
  VARIANT 20: note = Any amino acid
  VARIANT 21: note = Any amino acid
  VARIANT 22: note = Any amino acid
  VARIANT 23: note = Any amino acid
  VARIANT 24: note = Any amino acid
  VARIANT 25: note = Any amino acid
  VARIANT 26: note = Any amino acid
  VARIANT 27: note = Any amino acid
  VARIANT 28: note = Any amino acid
  VARIANT 29: note = Any amino acid
  VARIANT 30: note = Any amino acid
  VARIANT 32: note = Any amino acid
  VARIANT 33: note = Any amino acid
  VARIANT 34: note = Any amino acid
  VARIANT 35: note = Any amino acid
  VARIANT 36: note = Any amino acid
  VARIANT 37: note = Any amino acid
  VARIANT 38: note = Any amino acid
  VARIANT 41: note = Any amino acid
  VARIANT 42: note = Any amino acid
  VARIANT 43: note = Any amino acid
  VARIANT 44: note = Any amino acid
  VARIANT 45: note = Any amino acid
  VARIANT 46: note = Any amino acid
  VARIANT 47: note = Any amino acid
  VARIANT 48: note = Any amino acid
  VARIANT 49: note = Any amino acid
  VARIANT 50: note = Any amino acid
  VARIANT 51: note = Any amino acid
GXXXXXXXXXXXXXXXXXXXXXXXXXXXXXGXXXXXXXSGXXXXXXXXXXXQ

SEQ ID NO: 798049 - protein, 53 aa, unidentified
  VARIANT 2: note = Any amino acid
  VARIANT 3: note = Any amino acid
  VARIANT 4: note = Any amino acid
  VARIANT 5: note = Any amino acid
  VARIANT 6: note = Any amino acid
  VARIANT 7: note = Any amino acid
  VARIANT 8: note = Any amino acid
  VARIANT 9: note = Any amino acid
  VARIANT 10: note = Any amino acid
  VARIANT 11: note = Any amino acid
  VARIANT 12: note = Any amino acid
  VARIANT 13: note = Any amino acid
  VARIANT 14: note = Any amino acid
  VARIANT 15: note = Any amino acid
  VARIANT 16: note = Any amino acid
  VARIANT 17: note = Any amino acid
  VARIANT 18: note = Any amino acid
  VARIANT 19: note = Any amino acid
  VARIANT 20: note = Any amino acid
  VARIANT 21: note = Any amino acid
  VARIANT 22: note = Any amino acid
  VARIANT 23: note = Any amino acid
  VARIANT 24: note = Any amino acid
  VARIANT 25: note = Any amino acid
  VARIANT 26: note = Any amino acid
  VARIANT 27: note = Any amino acid
  VARIANT 28: note = Any amino acid
  VARIANT 29: note = Any amino acid
  VARIANT 30: note = Any amino acid
  VARIANT 32: note = Any amino acid
  VARIANT 33: note = Any amino acid
  VARIANT 34: note = Any amino acid
  VARIANT 35: note = Any amino acid
  VARIANT 36: note = Any amino acid
  VARIANT 37: note = Any amino acid
  VARIANT 38: note = Any amino acid
  VARIANT 41: note = Any amino acid
  VARIANT 42: note = Any amino acid
  VARIANT 43: note = Any amino acid
  VARIANT 44: note = Any amino acid
  VARIANT 45: note = Any amino acid
  VARIANT 46: note = Any amino acid
  VARIANT 47: note = Any amino acid
  VARIANT 48: note = Any amino acid
  VARIANT 49: note = Any amino acid
  VARIANT 50: note = Any amino acid
  VARIANT 51: note = Any amino acid
  VARIANT 52: note = Any amino acid
GXXXXXXXXXXXXXXXXXXXXXXXXXXXXXGXXXXXXXSAXXXXXXXXXXXXK

SEQ ID NO: 798050 - protein, 52 aa, unidentified
  VARIANT 2: note = Any amino acid
  VARIANT 3: note = Any amino acid
  VARIANT 4: note = Any amino acid
  VARIANT 5: note = Any amino acid
  VARIANT 6: note = Any amino acid
  VARIANT 7: note = Any amino acid
  VARIANT 8: note = Any amino acid
  VARIANT 9: note = Any amino acid
  VARIANT 10: note = Any amino acid
  VARIANT 11: note = Any amino acid
  VARIANT 12: note = Any amino acid
  VARIANT 13: note = Any amino acid
  VARIANT 14: note = Any amino acid
  VARIANT 15: note = Any amino acid
  VARIANT 16: note = Any amino acid
  VARIANT 17: note = Any amino acid
  VARIANT 18: note = Any amino acid
  VARIANT 19: note = Any amino acid
  VARIANT 20: note = Any amino acid
  VARIANT 21: note = Any amino acid
  VARIANT 22: note = Any amino acid
  VARIANT 23: note = Any amino acid
  VARIANT 24: note = Any amino acid
  VARIANT 25: note = Any amino acid
  VARIANT 26: note = Any amino acid
  VARIANT 27: note = Any amino acid
  VARIANT 28: note = Any amino acid
  VARIANT 29: note = Any amino acid
  VARIANT 30: note = Any amino acid
  VARIANT 32: note = Any amino acid
  VARIANT 33: note = Any amino acid
  VARIANT 34: note = Any amino acid
  VARIANT 35: note = Any amino acid
  VARIANT 36: note = Any amino acid
  VARIANT 37: note = Any amino acid
  VARIANT 38: note = Any amino acid
  VARIANT 41: note = Any amino acid
  VARIANT 42: note = Any amino acid
  VARIANT 43: note = Any amino acid
  VARIANT 44: note = Any amino acid
  VARIANT 45: note = Any amino acid
  VARIANT 46: note = Any amino acid
  VARIANT 47: note = Any amino acid
  VARIANT 48: note = Any amino acid
  VARIANT 49: note = Any amino acid
  VARIANT 50: note = Any amino acid
  VARIANT 51: note = Any amino acid
GXXXXXXXXXXXXXXXXXXXXXXXXXXXXXRXXXXXXXSSXXXXXXXXXXXG

SEQ ID NO: 798051 - protein, 52 aa, unidentified
  VARIANT 2: note = Any amino acid
  VARIANT 3: note = Any amino acid
  VARIANT 4: note = Any amino acid
  VARIANT 5: note = Any amino acid
  VARIANT 6: note = Any amino acid
  VARIANT 7: note = Any amino acid
  VARIANT 8: note = Any amino acid
  VARIANT 9: note = Any amino acid
  VARIANT 10: note = Any amino acid
  VARIANT 11: note = Any amino acid
  VARIANT 12: note = Any amino acid
  VARIANT 13: note = Any amino acid
  VARIANT 14: note = Any amino acid
  VARIANT 15: note = Any amino acid
  VARIANT 16: note = Any amino acid
  VARIANT 17: note = Any amino acid
  VARIANT 18: note = Any amino acid
  VARIANT 19: note = Any amino acid
  VARIANT 20: note = Any amino acid
  VARIANT 21: note = Any amino acid
  VARIANT 22: note = Any amino acid
  VARIANT 23: note = Any amino acid
  VARIANT 24: note = Any amino acid
  VARIANT 25: note = Any amino acid
  VARIANT 26: note = Any amino acid
  VARIANT 27: note = Any amino acid
  VARIANT 28: note = Any amino acid
  VARIANT 29: note = Any amino acid
  VARIANT 30: note = Any amino acid
  VARIANT 32: note = Any amino acid
  VARIANT 33: note = Any amino acid
  VARIANT 34: note = Any amino acid
  VARIANT 35: note = Any amino acid
  VARIANT 36: note = Any amino acid
  VARIANT 37: note = Any amino acid
  VARIANT 38: note = Any amino acid
  VARIANT 41: note = Any amino acid
  VARIANT 42: note = Any amino acid
  VARIANT 43: note = Any amino acid
  VARIANT 44: note = Any amino acid
  VARIANT 45: note = Any amino acid
  VARIANT 46: note = Any amino acid
  VARIANT 47: note = Any amino acid
  VARIANT 48: note = Any amino acid
  VARIANT 49: note = Any amino acid
  VARIANT 50: note = Any amino acid
  VARIANT 51: note = Any amino acid
GXXXXXXXXXXXXXXXXXXXXXXXXXXXXXGXXXXXXXTGXXXXXXXXXXXR

SEQ ID NO: 798052 - protein, 52 aa, unidentified
  VARIANT 2: note = Any amino acid
  VARIANT 3: note = Any amino acid
  VARIANT 4: note = Any amino acid
  VARIANT 5: note = Any amino acid
  VARIANT 6: note = Any amino acid
  VARIANT 7: note = Any amino acid
  VARIANT 8: note = Any amino acid
  VARIANT 9: note = Any amino acid
  VARIANT 10: note = Any amino acid
  VARIANT 11: note = Any amino acid
  VARIANT 12: note = Any amino acid
  VARIANT 13: note = Any amino acid
  VARIANT 14: note = Any amino acid
  VARIANT 15: note = Any amino acid
  VARIANT 16: note = Any amino acid
  VARIANT 17: note = Any amino acid
  VARIANT 18: note = Any amino acid
  VARIANT 19: note = Any amino acid
  VARIANT 20: note = Any amino acid
  VARIANT 21: note = Any amino acid
  VARIANT 22: note = Any amino acid
  VARIANT 23: note = Any amino acid
  VARIANT 24: note = Any amino acid
  VARIANT 25: note = Any amino acid
  VARIANT 26: note = Any amino acid
  VARIANT 27: note = Any amino acid
  VARIANT 28: note = Any amino acid
  VARIANT 29: note = Any amino acid
  VARIANT 30: note = Any amino acid
  VARIANT 32: note = Any amino acid
  VARIANT 33: note = Any amino acid
  VARIANT 34: note = Any amino acid
  VARIANT 35: note = Any amino acid
  VARIANT 36: note = Any amino acid
  VARIANT 37: note = Any amino acid
  VARIANT 38: note = Any amino acid
  VARIANT 41: note = Any amino acid
  VARIANT 42: note = Any amino acid
  VARIANT 43: note = Any amino acid
  VARIANT 44: note = Any amino acid
  VARIANT 45: note = Any amino acid
  VARIANT 46: note = Any amino acid
  VARIANT 47: note = Any amino acid
  VARIANT 48: note = Any amino acid
  VARIANT 49: note = Any amino acid
  VARIANT 50: note = Any amino acid
  VARIANT 51: note = Any amino acid
GXXXXXXXXXXXXXXXXXXXXXXXXXXXXXGXXXXXXXTGXXXXXXXXXXXA

SEQ ID NO: 798053 - protein, 52 aa, unidentified
  VARIANT 2: note = Any amino acid
  VARIANT 3: note = Any amino acid
  VARIANT 4: note = Any amino acid
  VARIANT 5: note = Any amino acid
  VARIANT 6: note = Any amino acid
  VARIANT 7: note = Any amino acid
  VARIANT 8: note = Any amino acid
  VARIANT 9: note = Any amino acid
  VARIANT 10: note = Any amino acid
  VARIANT 11: note = Any amino acid
  VARIANT 12: note = Any amino acid
  VARIANT 13: note = Any amino acid
  VARIANT 14: note = Any amino acid
  VARIANT 15: note = Any amino acid
  VARIANT 16: note = Any amino acid
  VARIANT 17: note = Any amino acid
  VARIANT 18: note = Any amino acid
  VARIANT 19: note = Any amino acid
  VARIANT 20: note = Any amino acid
  VARIANT 21: note = Any amino acid
  VARIANT 22: note = Any amino acid
  VARIANT 23: note = Any amino acid
  VARIANT 24: note = Any amino acid
  VARIANT 25: note = Any amino acid
  VARIANT 26: note = Any amino acid
  VARIANT 27: note = Any amino acid
  VARIANT 28: note = Any amino acid
  VARIANT 29: note = Any amino acid
  VARIANT 30: note = Any amino acid
  VARIANT 32: note = Any amino acid
  VARIANT 33: note = Any amino acid
  VARIANT 34: note = Any amino acid
  VARIANT 35: note = Any amino acid
  VARIANT 36: note = Any amino acid
  VARIANT 37: note = Any amino acid
  VARIANT 38: note = Any amino acid
  VARIANT 41: note = Any amino acid
  VARIANT 42: note = Any amino acid
  VARIANT 43: note = Any amino acid
  VARIANT 44: note = Any amino acid
  VARIANT 45: note = Any amino acid
  VARIANT 46: note = Any amino acid
  VARIANT 47: note = Any amino acid
  VARIANT 48: note = Any amino acid
  VARIANT 49: note = Any amino acid
  VARIANT 50: note = Any amino acid
  VARIANT 51: note = Any amino acid
SXXXXXXXXXXXXXXXXXXXXXXXXXXXXXGXXXXXXXTGXXXXXXXXXXXG

SEQ ID NO: 798054 - protein, 52 aa, unidentified
  VARIANT 2: note = Any amino acid
  VARIANT 3: note = Any amino acid
  VARIANT 4: note = Any amino acid
  VARIANT 5: note = Any amino acid
  VARIANT 6: note = Any amino acid
  VARIANT 7: note = Any amino acid
  VARIANT 8: note = Any amino acid
  VARIANT 9: note = Any amino acid
  VARIANT 10: note = Any amino acid
  VARIANT 11: note = Any amino acid
  VARIANT 12: note = Any amino acid
  VARIANT 13: note = Any amino acid
  VARIANT 14: note = Any amino acid
  VARIANT 15: note = Any amino acid
  VARIANT 16: note = Any amino acid
  VARIANT 17: note = Any amino acid
  VARIANT 18: note = Any amino acid
  VARIANT 19: note = Any amino acid
  VARIANT 20: note = Any amino acid
  VARIANT 21: note = Any amino acid
  VARIANT 22: note = Any amino acid
  VARIANT 23: note = Any amino acid
  VARIANT 24: note = Any amino acid
  VARIANT 25: note = Any amino acid
  VARIANT 26: note = Any amino acid
  VARIANT 27: note = Any amino acid
  VARIANT 28: note = Any amino acid
  VARIANT 29: note = Any amino acid
  VARIANT 30: note = Any amino acid
  VARIANT 32: note = Any amino acid
  VARIANT 33: note = Any amino acid
  VARIANT 34: note = Any amino acid
  VARIANT 35: note = Any amino acid
  VARIANT 36: note = Any amino acid
  VARIANT 37: note = Any amino acid
  VARIANT 38: note = Any amino acid
  VARIANT 41: note = Any amino acid
  VARIANT 42: note = Any amino acid
  VARIANT 43: note = Any amino acid
  VARIANT 44: note = Any amino acid
  VARIANT 45: note = Any amino acid
  VARIANT 46: note = Any amino acid
  VARIANT 47: note = Any amino acid
  VARIANT 48: note = Any amino acid
  VARIANT 49: note = Any amino acid
  VARIANT 50: note = Any amino acid
  VARIANT 51: note = Any amino acid
SXXXXXXXXXXXXXXXXXXXXXXXXXXXXXGXXXXXXXSAXXXXXXXXXXXG

SEQ ID NO: 798055 - protein, 53 aa, unidentified
  VARIANT 2: note = Any amino acid
  VARIANT 3: note = Any amino acid
  VARIANT 4: note = Any amino acid
  VARIANT 5: note = Any amino acid
  VARIANT 6: note = Any amino acid
  VARIANT 7: note = Any amino acid
  VARIANT 8: note = Any amino acid
  VARIANT 9: note = Any amino acid
  VARIANT 10: note = Any amino acid
  VARIANT 11: note = Any amino acid
  VARIANT 12: note = Any amino acid
  VARIANT 13: note = Any amino acid
  VARIANT 14: note = Any amino acid
  VARIANT 15: note = Any amino acid
  VARIANT 16: note = Any amino acid
  VARIANT 17: note = Any amino acid
  VARIANT 18: note = Any amino acid
  VARIANT 19: note = Any amino acid
  VARIANT 20: note = Any amino acid
  VARIANT 21: note = Any amino acid
  VARIANT 22: note = Any amino acid
  VARIANT 23: note = Any amino acid
  VARIANT 24: note = Any amino acid
  VARIANT 25: note = Any amino acid
  VARIANT 26: note = Any amino acid
  VARIANT 27: note = Any amino acid
  VARIANT 28: note = Any amino acid
  VARIANT 29: note = Any amino acid
  VARIANT 30: note = Any amino acid
  VARIANT 32: note = Any amino acid
  VARIANT 33: note = Any amino acid
  VARIANT 34: note = Any amino acid
  VARIANT 35: note = Any amino acid
  VARIANT 36: note = Any amino acid
  VARIANT 37: note = Any amino acid
  VARIANT 38: note = Any amino acid
  VARIANT 41: note = Any amino acid
  VARIANT 42: note = Any amino acid
  VARIANT 43: note = Any amino acid
  VARIANT 44: note = Any amino acid
  VARIANT 45: note = Any amino acid
  VARIANT 46: note = Any amino acid
  VARIANT 47: note = Any amino acid
  VARIANT 48: note = Any amino acid
  VARIANT 49: note = Any amino acid
  VARIANT 50: note = Any amino acid
  VARIANT 51: note = Any amino acid
  VARIANT 52: note = Any amino acid
FXXXXXXXXXXXXXXXXXXXXXXXXXXXXXGXXXXXXXSAXXXXXXXXXXXXK

SEQ ID NO: 798056 - protein, 52 aa, unidentified
  VARIANT 2: note = Any amino acid
  VARIANT 3: note = Any amino acid
  VARIANT 4: note = Any amino acid
  VARIANT 5: note = Any amino acid
  VARIANT 6: note = Any amino acid
  VARIANT 7: note = Any amino acid
  VARIANT 8: note = Any amino acid
  VARIANT 9: note = Any amino acid
  VARIANT 10: note = Any amino acid
  VARIANT 11: note = Any amino acid
  VARIANT 12: note = Any amino acid
  VARIANT 13: note = Any amino acid
  VARIANT 14: note = Any amino acid
  VARIANT 15: note = Any amino acid
  VARIANT 16: note = Any amino acid
  VARIANT 17: note = Any amino acid
  VARIANT 18: note = Any amino acid
  VARIANT 19: note = Any amino acid
  VARIANT 20: note = Any amino acid
  VARIANT 21: note = Any amino acid
  VARIANT 22: note = Any amino acid
  VARIANT 23: note = Any amino acid
  VARIANT 24: note = Any amino acid
  VARIANT 25: note = Any amino acid
  VARIANT 26: note = Any amino acid
  VARIANT 27: note = Any amino acid
  VARIANT 28: note = Any amino acid
  VARIANT 29: note = Any amino acid
  VARIANT 30: note = Any amino acid
  VARIANT 32: note = Any amino acid
  VARIANT 33: note = Any amino acid
  VARIANT 34: note = Any amino acid
  VARIANT 35: note = Any amino acid
  VARIANT 36: note = Any amino acid
  VARIANT 37: note = Any amino acid
  VARIANT 38: note = Any amino acid
  VARIANT 41: note = Any amino acid
  VARIANT 42: note = Any amino acid
  VARIANT 43: note = Any amino acid
  VARIANT 44: note = Any amino acid
  VARIANT 45: note = Any amino acid
  VARIANT 46: note = Any amino acid
  VARIANT 47: note = Any amino acid
  VARIANT 48: note = Any amino acid
  VARIANT 49: note = Any amino acid
  VARIANT 50: note = Any amino acid
  VARIANT 51: note = Any amino acid
GXXXXXXXXXXXXXXXXXXXXXXXXXXXXXGXXXXXXXRGXXXXXXXXXXXG

SEQ ID NO: 798057 - protein, 57 aa, unidentified
  VARIANT 2: note = Any amino acid
  VARIANT 3: note = Any amino acid
  VARIANT 4: note = Any amino acid
  VARIANT 5: note = Any amino acid
  VARIANT 6: note = Any amino acid
  VARIANT 7: note = Any amino acid
  VARIANT 8: note = Any amino acid
  VARIANT 9: note = Any amino acid
  VARIANT 10: note = Any amino acid
  VARIANT 11: note = Any amino acid
  VARIANT 12: note = Any amino acid
  VARIANT 13: note = Any amino acid
  VARIANT 14: note = Any amino acid
  VARIANT 15: note = Any amino acid
  VARIANT 16: note = Any amino acid
  VARIANT 17: note = Any amino acid
  VARIANT 18: note = Any amino acid
  VARIANT 19: note = Any amino acid
  VARIANT 20: note = Any amino acid
  VARIANT 21: note = Any amino acid
  VARIANT 22: note = Any amino acid
  VARIANT 23: note = Any amino acid
  VARIANT 24: note = Any amino acid
  VARIANT 25: note = Any amino acid
  VARIANT 26: note = Any amino acid
  VARIANT 27: note = Any amino acid
  VARIANT 28: note = Any amino acid
  VARIANT 29: note = Any amino acid
  VARIANT 30: note = Any amino acid
  VARIANT 32: note = Any amino acid
  VARIANT 33: note = Any amino acid
  VARIANT 34: note = Any amino acid
  VARIANT 35: note = Any amino acid
  VARIANT 36: note = Any amino acid
  VARIANT 37: note = Any amino acid
  VARIANT 38: note = Any amino acid
  VARIANT 41: note = Any amino acid
  VARIANT 42: note = Any amino acid
  VARIANT 43: note = Any amino acid
  VARIANT 44: note = Any amino acid
  VARIANT 45: note = Any amino acid
  VARIANT 46: note = Any amino acid
  VARIANT 47: note = Any amino acid
  VARIANT 48: note = Any amino acid
  VARIANT 49: note = Any amino acid
  VARIANT 50: note = Any amino acid
  VARIANT 51: note = Any amino acid
  VARIANT 52: note = Any amino acid
  VARIANT 53: note = Any amino acid
  VARIANT 54: note = Any amino acid
  VARIANT 55: note = Any amino acid
  VARIANT 56: note = Any amino acid
GXXXXXXXXXXXXXXXXXXXXXXXXXXXXXLXXXXXXXTGXXXXXXXXXXXXXXXXG

SEQ ID NO: 798058 - protein, 52 aa, unidentified
  VARIANT 2: note = Any amino acid
  VARIANT 3: note = Any amino acid
  VARIANT 4: note = Any amino acid
  VARIANT 5: note = Any amino acid
  VARIANT 6: note = Any amino acid
  VARIANT 7: note = Any amino acid
  VARIANT 8: note = Any amino acid
  VARIANT 9: note = Any amino acid
  VARIANT 10: note = Any amino acid
  VARIANT 11: note = Any amino acid
  VARIANT 12: note = Any amino acid
  VARIANT 13: note = Any amino acid
  VARIANT 14: note = Any amino acid
  VARIANT 15: note = Any amino acid
  VARIANT 16: note = Any amino acid
  VARIANT 17: note = Any amino acid
  VARIANT 18: note = Any amino acid
  VARIANT 19: note = Any amino acid
  VARIANT 20: note = Any amino acid
  VARIANT 21: note = Any amino acid
  VARIANT 22: note = Any amino acid
  VARIANT 23: note = Any amino acid
  VARIANT 24: note = Any amino acid
  VARIANT 25: note = Any amino acid
  VARIANT 26: note = Any amino acid
  VARIANT 27: note = Any amino acid
  VARIANT 28: note = Any amino acid
  VARIANT 29: note = Any amino acid
  VARIANT 30: note = Any amino acid
  VARIANT 32: note = Any amino acid
  VARIANT 33: note = Any amino acid
  VARIANT 34: note = Any amino acid
  VARIANT 35: note = Any amino acid
  VARIANT 36: note = Any amino acid
  VARIANT 37: note = Any amino acid
  VARIANT 38: note = Any amino acid
  VARIANT 41: note = Any amino acid
  VARIANT 42: note = Any amino acid
  VARIANT 43: note = Any amino acid
  VARIANT 44: note = Any amino acid
  VARIANT 45: note = Any amino acid
  VARIANT 46: note = Any amino acid
  VARIANT 47: note = Any amino acid
  VARIANT 48: note = Any amino acid
  VARIANT 49: note = Any amino acid
  VARIANT 50: note = Any amino acid
  VARIANT 51: note = Any amino acid
GXXXXXXXXXXXXXXXXXXXXXXXXXXXXXGXXXXXXXTGXXXXXXXXXXXS

SEQ ID NO: 798059 - protein, 52 aa, unidentified
  VARIANT 2: note = Any amino acid
  VARIANT 3: note = Any amino acid
  VARIANT 4: note = Any amino acid
  VARIANT 5: note = Any amino acid
  VARIANT 6: note = Any amino acid
  VARIANT 7: note = Any amino acid
  VARIANT 8: note = Any amino acid
  VARIANT 9: note = Any amino acid
  VARIANT 10: note = Any amino acid
  VARIANT 11: note = Any amino acid
  VARIANT 12: note = Any amino acid
  VARIANT 13: note = Any amino acid
  VARIANT 14: note = Any amino acid
  VARIANT 15: note = Any amino acid
  VARIANT 16: note = Any amino acid
  VARIANT 17: note = Any amino acid
  VARIANT 18: note = Any amino acid
  VARIANT 19: note = Any amino acid
  VARIANT 20: note = Any amino acid
  VARIANT 21: note = Any amino acid
  VARIANT 22: note = Any amino acid
  VARIANT 23: note = Any amino acid
  VARIANT 24: note = Any amino acid
  VARIANT 25: note = Any amino acid
  VARIANT 26: note = Any amino acid
  VARIANT 27: note = Any amino acid
  VARIANT 28: note = Any amino acid
  VARIANT 29: note = Any amino acid
  VARIANT 30: note = Any amino acid
  VARIANT 32: note = Any amino acid
  VARIANT 33: note = Any amino acid
  VARIANT 34: note = Any amino acid
  VARIANT 35: note = Any amino acid
  VARIANT 36: note = Any amino acid
  VARIANT 37: note = Any amino acid
  VARIANT 38: note = Any amino acid
  VARIANT 41: note = Any amino acid
  VARIANT 42: note = Any amino acid
  VARIANT 43: note = Any amino acid
  VARIANT 44: note = Any amino acid
  VARIANT 45: note = Any amino acid
  VARIANT 46: note = Any amino acid
  VARIANT 47: note = Any amino acid
  VARIANT 48: note = Any amino acid
  VARIANT 49: note = Any amino acid
  VARIANT 50: note = Any amino acid
  VARIANT 51: note = Any amino acid
AXXXXXXXXXXXXXXXXXXXXXXXXXXXXXGXXXXXXXTAXXXXXXXXXXXG

SEQ ID NO: 798060 - protein, 51 aa, unidentified
  VARIANT 2: note = Any amino acid
  VARIANT 3: note = Any amino acid
  VARIANT 4: note = Any amino acid
  VARIANT 5: note = Any amino acid
  VARIANT 6: note = Any amino acid
  VARIANT 7: note = Any amino acid
  VARIANT 8: note = Any amino acid
  VARIANT 9: note = Any amino acid
  VARIANT 10: note = Any amino acid
  VARIANT 11: note = Any amino acid
  VARIANT 12: note = Any amino acid
  VARIANT 13: note = Any amino acid
  VARIANT 14: note = Any amino acid
  VARIANT 15: note = Any amino acid
  VARIANT 16: note = Any amino acid
  VARIANT 17: note = Any amino acid
  VARIANT 18: note = Any amino acid
  VARIANT 19: note = Any amino acid
  VARIANT 20: note = Any amino acid
  VARIANT 21: note = Any amino acid
  VARIANT 22: note = Any amino acid
  VARIANT 23: note = Any amino acid
  VARIANT 24: note = Any amino acid
  VARIANT 25: note = Any amino acid
  VARIANT 26: note = Any amino acid
  VARIANT 27: note = Any amino acid
  VARIANT 28: note = Any amino acid
  VARIANT 29: note = Any amino acid
  VARIANT 30: note = Any amino acid
  VARIANT 32: note = Any amino acid
  VARIANT 33: note = Any amino acid
  VARIANT 34: note = Any amino acid
  VARIANT 35: note = Any amino acid
  VARIANT 36: note = Any amino acid
  VARIANT 37: note = Any amino acid
  VARIANT 38: note = Any amino acid
  VARIANT 41: note = Any amino acid
  VARIANT 42: note = Any amino acid
  VARIANT 43: note = Any amino acid
  VARIANT 44: note = Any amino acid
  VARIANT 45: note = Any amino acid
  VARIANT 46: note = Any amino acid
  VARIANT 47: note = Any amino acid
  VARIANT 48: note = Any amino acid
  VARIANT 49: note = Any amino acid
  VARIANT 50: note = Any amino acid
GXXXXXXXXXXXXXXXXXXXXXXXXXXXXXGXXXXXXXSGXXXXXXXXXXF

SEQ ID NO: 798061 - protein, 51 aa, unidentified
  VARIANT 2: note = Any amino acid
  VARIANT 3: note = Any amino acid
  VARIANT 4: note = Any amino acid
  VARIANT 5: note = Any amino acid
  VARIANT 6: note = Any amino acid
  VARIANT 7: note = Any amino acid
  VARIANT 8: note = Any amino acid
  VARIANT 9: note = Any amino acid
  VARIANT 10: note = Any amino acid
  VARIANT 11: note = Any amino acid
  VARIANT 12: note = Any amino acid
  VARIANT 13: note = Any amino acid
  VARIANT 14: note = Any amino acid
  VARIANT 15: note = Any amino acid
  VARIANT 16: note = Any amino acid
  VARIANT 17: note = Any amino acid
  VARIANT 18: note = Any amino acid
  VARIANT 19: note = Any amino acid
  VARIANT 20: note = Any amino acid
  VARIANT 21: note = Any amino acid
  VARIANT 22: note = Any amino acid
  VARIANT 23: note = Any amino acid
  VARIANT 24: note = Any amino acid
  VARIANT 25: note = Any amino acid
  VARIANT 26: note = Any amino acid
  VARIANT 27: note = Any amino acid
  VARIANT 28: note = Any amino acid
  VARIANT 29: note = Any amino acid
  VARIANT 30: note = Any amino acid
  VARIANT 32: note = Any amino acid
  VARIANT 33: note = Any amino acid
  VARIANT 34: note = Any amino acid
  VARIANT 35: note = Any amino acid
  VARIANT 36: note = Any amino acid
  VARIANT 37: note = Any amino acid
  VARIANT 38: note = Any amino acid
  VARIANT 41: note = Any amino acid
  VARIANT 42: note = Any amino acid
  VARIANT 43: note = Any amino acid
  VARIANT 44: note = Any amino acid
  VARIANT 45: note = Any amino acid
  VARIANT 46: note = Any amino acid
  VARIANT 47: note = Any amino acid
  VARIANT 48: note = Any amino acid
  VARIANT 49: note = Any amino acid
  VARIANT 50: note = Any amino acid
GXXXXXXXXXXXXXXXXXXXXXXXXXXXXXRXXXXXXXSAXXXXXXXXXXG

SEQ ID NO: 798062 - protein, 52 aa, unidentified
  VARIANT 2: note = Any amino acid
  VARIANT 3: note = Any amino acid
  VARIANT 4: note = Any amino acid
  VARIANT 5: note = Any amino acid
  VARIANT 6: note = Any amino acid
  VARIANT 7: note = Any amino acid
  VARIANT 8: note = Any amino acid
  VARIANT 9: note = Any amino acid
  VARIANT 10: note = Any amino acid
  VARIANT 11: note = Any amino acid
  VARIANT 12: note = Any amino acid
  VARIANT 13: note = Any amino acid
  VARIANT 14: note = Any amino acid
  VARIANT 15: note = Any amino acid
  VARIANT 16: note = Any amino acid
  VARIANT 17: note = Any amino acid
  VARIANT 18: note = Any amino acid
  VARIANT 19: note = Any amino acid
  VARIANT 20: note = Any amino acid
  VARIANT 21: note = Any amino acid
  VARIANT 22: note = Any amino acid
  VARIANT 23: note = Any amino acid
  VARIANT 24: note = Any amino acid
  VARIANT 25: note = Any amino acid
  VARIANT 26: note = Any amino acid
  VARIANT 27: note = Any amino acid
  VARIANT 28: note = Any amino acid
  VARIANT 29: note = Any amino acid
  VARIANT 30: note = Any amino acid
  VARIANT 32: note = Any amino acid
  VARIANT 33: note = Any amino acid
  VARIANT 34: note = Any amino acid
  VARIANT 35: note = Any amino acid
  VARIANT 36: note = Any amino acid
  VARIANT 37: note = Any amino acid
  VARIANT 38: note = Any amino acid
  VARIANT 41: note = Any amino acid
  VARIANT 42: note = Any amino acid
  VARIANT 43: note = Any amino acid
  VARIANT 44: note = Any amino acid
  VARIANT 45: note = Any amino acid
  VARIANT 46: note = Any amino acid
  VARIANT 47: note = Any amino acid
  VARIANT 48: note = Any amino acid
  VARIANT 49: note = Any amino acid
  VARIANT 50: note = Any amino acid
  VARIANT 51: note = Any amino acid
TXXXXXXXXXXXXXXXXXXXXXXXXXXXXXGXXXXXXXTAXXXXXXXXXXXG

SEQ ID NO: 798063 - protein, 52 aa, unidentified
  VARIANT 2: note = Any amino acid
  VARIANT 3: note = Any amino acid
  VARIANT 4: note = Any amino acid
  VARIANT 5: note = Any amino acid
  VARIANT 6: note = Any amino acid
  VARIANT 7: note = Any amino acid
  VARIANT 8: note = Any amino acid
  VARIANT 9: note = Any amino acid
  VARIANT 10: note = Any amino acid
  VARIANT 11: note = Any amino acid
  VARIANT 12: note = Any amino acid
  VARIANT 13: note = Any amino acid
  VARIANT 14: note = Any amino acid
  VARIANT 15: note = Any amino acid
  VARIANT 16: note = Any amino acid
  VARIANT 17: note = Any amino acid
  VARIANT 18: note = Any amino acid
  VARIANT 19: note = Any amino acid
  VARIANT 20: note = Any amino acid
  VARIANT 21: note = Any amino acid
  VARIANT 22: note = Any amino acid
  VARIANT 23: note = Any amino acid
  VARIANT 24: note = Any amino acid
  VARIANT 25: note = Any amino acid
  VARIANT 26: note = Any amino acid
  VARIANT 27: note = Any amino acid
  VARIANT 28: note = Any amino acid
  VARIANT 29: note = Any amino acid
  VARIANT 30: note = Any amino acid
  VARIANT 32: note = Any amino acid
  VARIANT 33: note = Any amino acid
  VARIANT 34: note = Any amino acid
  VARIANT 35: note = Any amino acid
  VARIANT 36: note = Any amino acid
  VARIANT 37: note = Any amino acid
  VARIANT 38: note = Any amino acid
  VARIANT 41: note = Any amino acid
  VARIANT 42: note = Any amino acid
  VARIANT 43: note = Any amino acid
  VARIANT 44: note = Any amino acid
  VARIANT 45: note = Any amino acid
  VARIANT 46: note = Any amino acid
  VARIANT 47: note = Any amino acid
  VARIANT 48: note = Any amino acid
  VARIANT 49: note = Any amino acid
  VARIANT 50: note = Any amino acid
  VARIANT 51: note = Any amino acid
GXXXXXXXXXXXXXXXXXXXXXXXXXXXXXGXXXXXXXSSXXXXXXXXXXXS

SEQ ID NO: 798064 - protein, 53 aa, unidentified
  VARIANT 2: note = Any amino acid
  VARIANT 3: note = Any amino acid
  VARIANT 4: note = Any amino acid
  VARIANT 5: note = Any amino acid
  VARIANT 6: note = Any amino acid
  VARIANT 7: note = Any amino acid
  VARIANT 8: note = Any amino acid
  VARIANT 9: note = Any amino acid
  VARIANT 10: note = Any amino acid
  VARIANT 11: note = Any amino acid
  VARIANT 12: note = Any amino acid
  VARIANT 13: note = Any amino acid
  VARIANT 14: note = Any amino acid
  VARIANT 15: note = Any amino acid
  VARIANT 16: note = Any amino acid
  VARIANT 17: note = Any amino acid
  VARIANT 18: note = Any amino acid
  VARIANT 19: note = Any amino acid
  VARIANT 20: note = Any amino acid
  VARIANT 21: note = Any amino acid
  VARIANT 22: note = Any amino acid
  VARIANT 23: note = Any amino acid
  VARIANT 24: note = Any amino acid
  VARIANT 25: note = Any amino acid
  VARIANT 26: note = Any amino acid
  VARIANT 27: note = Any amino acid
  VARIANT 28: note = Any amino acid
  VARIANT 29: note = Any amino acid
  VARIANT 30: note = Any amino acid
  VARIANT 32: note = Any amino acid
  VARIANT 33: note = Any amino acid
  VARIANT 34: note = Any amino acid
  VARIANT 35: note = Any amino acid
  VARIANT 36: note = Any amino acid
  VARIANT 37: note = Any amino acid
  VARIANT 38: note = Any amino acid
  VARIANT 41: note = Any amino acid
  VARIANT 42: note = Any amino acid
  VARIANT 43: note = Any amino acid
  VARIANT 44: note = Any amino acid
  VARIANT 45: note = Any amino acid
  VARIANT 46: note = Any amino acid
  VARIANT 47: note = Any amino acid
  VARIANT 48: note = Any amino acid
  VARIANT 49: note = Any amino acid
  VARIANT 50: note = Any amino acid
  VARIANT 51: note = Any amino acid
  VARIANT 52: note = Any amino acid
GXXXXXXXXXXXXXXXXXXXXXXXXXXXXXRXXXXXXXSNXXXXXXXXXXXXG

SEQ ID NO: 798065 - protein, 52 aa, unidentified
  VARIANT 2: note = Any amino acid
  VARIANT 3: note = Any amino acid
  VARIANT 4: note = Any amino acid
  VARIANT 5: note = Any amino acid
  VARIANT 6: note = Any amino acid
  VARIANT 7: note = Any amino acid
  VARIANT 8: note = Any amino acid
  VARIANT 9: note = Any amino acid
  VARIANT 10: note = Any amino acid
  VARIANT 11: note = Any amino acid
  VARIANT 12: note = Any amino acid
  VARIANT 13: note = Any amino acid
  VARIANT 14: note = Any amino acid
  VARIANT 15: note = Any amino acid
  VARIANT 16: note = Any amino acid
  VARIANT 17: note = Any amino acid
  VARIANT 18: note = Any amino acid
  VARIANT 19: note = Any amino acid
  VARIANT 20: note = Any amino acid
  VARIANT 21: note = Any amino acid
  VARIANT 22: note = Any amino acid
  VARIANT 23: note = Any amino acid
  VARIANT 24: note = Any amino acid
  VARIANT 25: note = Any amino acid
  VARIANT 26: note = Any amino acid
  VARIANT 27: note = Any amino acid
  VARIANT 28: note = Any amino acid
  VARIANT 29: note = Any amino acid
  VARIANT 30: note = Any amino acid
  VARIANT 32: note = Any amino acid
  VARIANT 33: note = Any amino acid
  VARIANT 34: note = Any amino acid
  VARIANT 35: note = Any amino acid
  VARIANT 36: note = Any amino acid
  VARIANT 37: note = Any amino acid
  VARIANT 38: note = Any amino acid
  VARIANT 41: note = Any amino acid
  VARIANT 42: note = Any amino acid
  VARIANT 43: note = Any amino acid
  VARIANT 44: note = Any amino acid
  VARIANT 45: note = Any amino acid
  VARIANT 46: note = Any amino acid
  VARIANT 47: note = Any amino acid
  VARIANT 48: note = Any amino acid
  VARIANT 49: note = Any amino acid
  VARIANT 50: note = Any amino acid
  VARIANT 51: note = Any amino acid
GXXXXXXXXXXXXXXXXXXXXXXXXXXXXXGXXXXXXXSAXXXXXXXXXXXA

SEQ ID NO: 798066 - protein, 52 aa, unidentified
  VARIANT 2: note = Any amino acid
  VARIANT 3: note = Any amino acid
  VARIANT 4: note = Any amino acid
  VARIANT 5: note = Any amino acid
  VARIANT 6: note = Any amino acid
  VARIANT 7: note = Any amino acid
  VARIANT 8: note = Any amino acid
  VARIANT 9: note = Any amino acid
  VARIANT 10: note = Any amino acid
  VARIANT 11: note = Any amino acid
  VARIANT 12: note = Any amino acid
  VARIANT 13: note = Any amino acid
  VARIANT 14: note = Any amino acid
  VARIANT 15: note = Any amino acid
  VARIANT 16: note = Any amino acid
  VARIANT 17: note = Any amino acid
  VARIANT 18: note = Any amino acid
  VARIANT 19: note = Any amino acid
  VARIANT 20: note = Any amino acid
  VARIANT 21: note = Any amino acid
  VARIANT 22: note = Any amino acid
  VARIANT 23: note = Any amino acid
  VARIANT 24: note = Any amino acid
  VARIANT 25: note = Any amino acid
  VARIANT 26: note = Any amino acid
  VARIANT 27: note = Any amino acid
  VARIANT 28: note = Any amino acid
  VARIANT 29: note = Any amino acid
  VARIANT 30: note = Any amino acid
  VARIANT 32: note = Any amino acid
  VARIANT 33: note = Any amino acid
  VARIANT 34: note = Any amino acid
  VARIANT 35: note = Any amino acid
  VARIANT 36: note = Any amino acid
  VARIANT 37: note = Any amino acid
  VARIANT 38: note = Any amino acid
  VARIANT 41: note = Any amino acid
  VARIANT 42: note = Any amino acid
  VARIANT 43: note = Any amino acid
  VARIANT 44: note = Any amino acid
  VARIANT 45: note = Any amino acid
  VARIANT 46: note = Any amino acid
  VARIANT 47: note = Any amino acid
  VARIANT 48: note = Any amino acid
  VARIANT 49: note = Any amino acid
  VARIANT 50: note = Any amino acid
  VARIANT 51: note = Any amino acid
CXXXXXXXXXXXXXXXXXXXXXXXXXXXXXGXXXXXXXTGXXXXXXXXXXXG

SEQ ID NO: 798067 - protein, 52 aa, unidentified
  VARIANT 2: note = Any amino acid
  VARIANT 3: note = Any amino acid
  VARIANT 4: note = Any amino acid
  VARIANT 5: note = Any amino acid
  VARIANT 6: note = Any amino acid
  VARIANT 7: note = Any amino acid
  VARIANT 8: note = Any amino acid
  VARIANT 9: note = Any amino acid
  VARIANT 10: note = Any amino acid
  VARIANT 11: note = Any amino acid
  VARIANT 12: note = Any amino acid
  VARIANT 13: note = Any amino acid
  VARIANT 14: note = Any amino acid
  VARIANT 15: note = Any amino acid
  VARIANT 16: note = Any amino acid
  VARIANT 17: note = Any amino acid
  VARIANT 18: note = Any amino acid
  VARIANT 19: note = Any amino acid
  VARIANT 20: note = Any amino acid
  VARIANT 21: note = Any amino acid
  VARIANT 22: note = Any amino acid
  VARIANT 23: note = Any amino acid
  VARIANT 24: note = Any amino acid
  VARIANT 25: note = Any amino acid
  VARIANT 26: note = Any amino acid
  VARIANT 27: note = Any amino acid
  VARIANT 28: note = Any amino acid
  VARIANT 29: note = Any amino acid
  VARIANT 30: note = Any amino acid
  VARIANT 32: note = Any amino acid
  VARIANT 33: note = Any amino acid
  VARIANT 34: note = Any amino acid
  VARIANT 35: note = Any amino acid
  VARIANT 36: note = Any amino acid
  VARIANT 37: note = Any amino acid
  VARIANT 38: note = Any amino acid
  VARIANT 41: note = Any amino acid
  VARIANT 42: note = Any amino acid
  VARIANT 43: note = Any amino acid
  VARIANT 44: note = Any amino acid
  VARIANT 45: note = Any amino acid
  VARIANT 46: note = Any amino acid
  VARIANT 47: note = Any amino acid
  VARIANT 48: note = Any amino acid
  VARIANT 49: note = Any amino acid
  VARIANT 50: note = Any amino acid
  VARIANT 51: note = Any amino acid
GXXXXXXXXXXXXXXXXXXXXXXXXXXXXXGXXXXXXXTSXXXXXXXXXXXG

SEQ ID NO: 798068 - protein, 52 aa, unidentified
  VARIANT 2: note = Any amino acid
  VARIANT 3: note = Any amino acid
  VARIANT 4: note = Any amino acid
  VARIANT 5: note = Any amino acid
  VARIANT 6: note = Any amino acid
  VARIANT 7: note = Any amino acid
  VARIANT 8: note = Any amino acid
  VARIANT 9: note = Any amino acid
  VARIANT 10: note = Any amino acid
  VARIANT 11: note = Any amino acid
  VARIANT 12: note = Any amino acid
  VARIANT 13: note = Any amino acid
  VARIANT 14: note = Any amino acid
  VARIANT 15: note = Any amino acid
  VARIANT 16: note = Any amino acid
  VARIANT 17: note = Any amino acid
  VARIANT 18: note = Any amino acid
  VARIANT 19: note = Any amino acid
  VARIANT 20: note = Any amino acid
  VARIANT 21: note = Any amino acid
  VARIANT 22: note = Any amino acid
  VARIANT 23: note = Any amino acid
  VARIANT 24: note = Any amino acid
  VARIANT 25: note = Any amino acid
  VARIANT 26: note = Any amino acid
  VARIANT 27: note = Any amino acid
  VARIANT 28: note = Any amino acid
  VARIANT 29: note = Any amino acid
  VARIANT 30: note = Any amino acid
  VARIANT 32: note = Any amino acid
  VARIANT 33: note = Any amino acid
  VARIANT 34: note = Any amino acid
  VARIANT 35: note = Any amino acid
  VARIANT 36: note = Any amino acid
  VARIANT 37: note = Any amino acid
  VARIANT 38: note = Any amino acid
  VARIANT 41: note = Any amino acid
  VARIANT 42: note = Any amino acid
  VARIANT 43: note = Any amino acid
  VARIANT 44: note = Any amino acid
  VARIANT 45: note = Any amino acid
  VARIANT 46: note = Any amino acid
  VARIANT 47: note = Any amino acid
  VARIANT 48: note = Any amino acid
  VARIANT 49: note = Any amino acid
  VARIANT 50: note = Any amino acid
  VARIANT 51: note = Any amino acid
QXXXXXXXXXXXXXXXXXXXXXXXXXXXXXGXXXXXXXSAXXXXXXXXXXXG

SEQ ID NO: 798069 - protein, 54 aa, unidentified
  VARIANT 2: note = Any amino acid
  VARIANT 3: note = Any amino acid
  VARIANT 4: note = Any amino acid
  VARIANT 5: note = Any amino acid
  VARIANT 6: note = Any amino acid
  VARIANT 7: note = Any amino acid
  VARIANT 8: note = Any amino acid
  VARIANT 9: note = Any amino acid
  VARIANT 10: note = Any amino acid
  VARIANT 11: note = Any amino acid
  VARIANT 12: note = Any amino acid
  VARIANT 13: note = Any amino acid
  VARIANT 14: note = Any amino acid
  VARIANT 15: note = Any amino acid
  VARIANT 16: note = Any amino acid
  VARIANT 17: note = Any amino acid
  VARIANT 18: note = Any amino acid
  VARIANT 19: note = Any amino acid
  VARIANT 20: note = Any amino acid
  VARIANT 21: note = Any amino acid
  VARIANT 22: note = Any amino acid
  VARIANT 23: note = Any amino acid
  VARIANT 24: note = Any amino acid
  VARIANT 25: note = Any amino acid
  VARIANT 26: note = Any amino acid
  VARIANT 27: note = Any amino acid
  VARIANT 28: note = Any amino acid
  VARIANT 29: note = Any amino acid
  VARIANT 30: note = Any amino acid
  VARIANT 31: note = Any amino acid
  VARIANT 32: note = Any amino acid
  VARIANT 34: note = Any amino acid
  VARIANT 35: note = Any amino acid
  VARIANT 36: note = Any amino acid
  VARIANT 37: note = Any amino acid
  VARIANT 38: note = Any amino acid
  VARIANT 39: note = Any amino acid
  VARIANT 40: note = Any amino acid
  VARIANT 43: note = Any amino acid
  VARIANT 44: note = Any amino acid
  VARIANT 45: note = Any amino acid
  VARIANT 46: note = Any amino acid
  VARIANT 47: note = Any amino acid
  VARIANT 48: note = Any amino acid
  VARIANT 49: note = Any amino acid
  VARIANT 50: note = Any amino acid
  VARIANT 51: note = Any amino acid
  VARIANT 52: note = Any amino acid
  VARIANT 53: note = Any amino acid
GXXXXXXXXXXXXXXXXXXXXXXXXXXXXXXXGXXXXXXXSGXXXXXXXXXXXA

SEQ ID NO: 798070 - protein, 53 aa, unidentified
  VARIANT 2: note = Any amino acid
  VARIANT 3: note = Any amino acid
  VARIANT 4: note = Any amino acid
  VARIANT 5: note = Any amino acid
  VARIANT 6: note = Any amino acid
  VARIANT 7: note = Any amino acid
  VARIANT 8: note = Any amino acid
  VARIANT 9: note = Any amino acid
  VARIANT 10: note = Any amino acid
  VARIANT 11: note = Any amino acid
  VARIANT 12: note = Any amino acid
  VARIANT 13: note = Any amino acid
  VARIANT 14: note = Any amino acid
  VARIANT 15: note = Any amino acid
  VARIANT 16: note = Any amino acid
  VARIANT 17: note = Any amino acid
  VARIANT 18: note = Any amino acid
  VARIANT 19: note = Any amino acid
  VARIANT 20: note = Any amino acid
  VARIANT 21: note = Any amino acid
  VARIANT 22: note = Any amino acid
  VARIANT 23: note = Any amino acid
  VARIANT 24: note = Any amino acid
  VARIANT 25: note = Any amino acid
  VARIANT 26: note = Any amino acid
  VARIANT 27: note = Any amino acid
  VARIANT 28: note = Any amino acid
  VARIANT 29: note = Any amino acid
  VARIANT 30: note = Any amino acid
  VARIANT 32: note = Any amino acid
  VARIANT 33: note = Any amino acid
  VARIANT 34: note = Any amino acid
  VARIANT 35: note = Any amino acid
  VARIANT 36: note = Any amino acid
  VARIANT 37: note = Any amino acid
  VARIANT 38: note = Any amino acid
  VARIANT 41: note = Any amino acid
  VARIANT 42: note = Any amino acid
  VARIANT 43: note = Any amino acid
  VARIANT 44: note = Any amino acid
  VARIANT 45: note = Any amino acid
  VARIANT 46: note = Any amino acid
  VARIANT 47: note = Any amino acid
  VARIANT 48: note = Any amino acid
  VARIANT 49: note = Any amino acid
  VARIANT 50: note = Any amino acid
  VARIANT 51: note = Any amino acid
  VARIANT 52: note = Any amino acid
GXXXXXXXXXXXXXXXXXXXXXXXXXXXXXKXXXXXXXSDXXXXXXXXXXXXG

SEQ ID NO: 798071 - protein, 51 aa, unidentified
  VARIANT 2: note = Any amino acid
  VARIANT 3: note = Any amino acid
  VARIANT 4: note = Any amino acid
  VARIANT 5: note = Any amino acid
  VARIANT 6: note = Any amino acid
  VARIANT 7: note = Any amino acid
  VARIANT 8: note = Any amino acid
  VARIANT 9: note = Any amino acid
  VARIANT 10: note = Any amino acid
  VARIANT 11: note = Any amino acid
  VARIANT 12: note = Any amino acid
  VARIANT 13: note = Any amino acid
  VARIANT 14: note = Any amino acid
  VARIANT 15: note = Any amino acid
  VARIANT 16: note = Any amino acid
  VARIANT 17: note = Any amino acid
  VARIANT 18: note = Any amino acid
  VARIANT 19: note = Any amino acid
  VARIANT 20: note = Any amino acid
  VARIANT 21: note = Any amino acid
  VARIANT 22: note = Any amino acid
  VARIANT 23: note = Any amino acid
  VARIANT 24: note = Any amino acid
  VARIANT 25: note = Any amino acid
  VARIANT 26: note = Any amino acid
  VARIANT 27: note = Any amino acid
  VARIANT 28: note = Any amino acid
  VARIANT 29: note = Any amino acid
  VARIANT 30: note = Any amino acid
  VARIANT 32: note = Any amino acid
  VARIANT 33: note = Any amino acid
  VARIANT 34: note = Any amino acid
  VARIANT 35: note = Any amino acid
  VARIANT 36: note = Any amino acid
  VARIANT 37: note = Any amino acid
  VARIANT 38: note = Any amino acid
  VARIANT 41: note = Any amino acid
  VARIANT 42: note = Any amino acid
  VARIANT 43: note = Any amino acid
  VARIANT 44: note = Any amino acid
  VARIANT 45: note = Any amino acid
  VARIANT 46: note = Any amino acid
  VARIANT 47: note = Any amino acid
  VARIANT 48: note = Any amino acid
  VARIANT 49: note = Any amino acid
  VARIANT 50: note = Any amino acid
GXXXXXXXXXXXXXXXXXXXXXXXXXXXXXGXXXXXXXSVXXXXXXXXXXG

SEQ ID NO: 798072 - protein, 53 aa, unidentified
  VARIANT 2: note = Any amino acid
  VARIANT 3: note = Any amino acid
  VARIANT 4: note = Any amino acid
  VARIANT 5: note = Any amino acid
  VARIANT 6: note = Any amino acid
  VARIANT 7: note = Any amino acid
  VARIANT 8: note = Any amino acid
  VARIANT 9: note = Any amino acid
  VARIANT 10: note = Any amino acid
  VARIANT 11: note = Any amino acid
  VARIANT 12: note = Any amino acid
  VARIANT 13: note = Any amino acid
  VARIANT 14: note = Any amino acid
  VARIANT 15: note = Any amino acid
  VARIANT 16: note = Any amino acid
  VARIANT 17: note = Any amino acid
  VARIANT 18: note = Any amino acid
  VARIANT 19: note = Any amino acid
  VARIANT 20: note = Any amino acid
  VARIANT 21: note = Any amino acid
  VARIANT 22: note = Any amino acid
  VARIANT 23: note = Any amino acid
  VARIANT 24: note = Any amino acid
  VARIANT 25: note = Any amino acid
  VARIANT 26: note = Any amino acid
  VARIANT 27: note = Any amino acid
  VARIANT 28: note = Any amino acid
  VARIANT 29: note = Any amino acid
  VARIANT 30: note = Any amino acid
  VARIANT 32: note = Any amino acid
  VARIANT 33: note = Any amino acid
  VARIANT 34: note = Any amino acid
  VARIANT 35: note = Any amino acid
  VARIANT 36: note = Any amino acid
  VARIANT 37: note = Any amino acid
  VARIANT 38: note = Any amino acid
  VARIANT 41: note = Any amino acid
  VARIANT 42: note = Any amino acid
  VARIANT 43: note = Any amino acid
  VARIANT 44: note = Any amino acid
  VARIANT 45: note = Any amino acid
  VARIANT 46: note = Any amino acid
  VARIANT 47: note = Any amino acid
  VARIANT 48: note = Any amino acid
  VARIANT 49: note = Any amino acid
  VARIANT 50: note = Any amino acid
  VARIANT 51: note = Any amino acid
  VARIANT 52: note = Any amino acid
QXXXXXXXXXXXXXXXXXXXXXXXXXXXXXGXXXXXXXSAXXXXXXXXXXXXR

SEQ ID NO: 798073 - protein, 52 aa, unidentified
  VARIANT 2: note = Any amino acid
  VARIANT 3: note = Any amino acid
  VARIANT 4: note = Any amino acid
  VARIANT 5: note = Any amino acid
  VARIANT 6: note = Any amino acid
  VARIANT 7: note = Any amino acid
  VARIANT 8: note = Any amino acid
  VARIANT 9: note = Any amino acid
  VARIANT 10: note = Any amino acid
  VARIANT 11: note = Any amino acid
  VARIANT 12: note = Any amino acid
  VARIANT 13: note = Any amino acid
  VARIANT 14: note = Any amino acid
  VARIANT 15: note = Any amino acid
  VARIANT 16: note = Any amino acid
  VARIANT 17: note = Any amino acid
  VARIANT 18: note = Any amino acid
  VARIANT 19: note = Any amino acid
  VARIANT 20: note = Any amino acid
  VARIANT 21: note = Any amino acid
  VARIANT 22: note = Any amino acid
  VARIANT 23: note = Any amino acid
  VARIANT 24: note = Any amino acid
  VARIANT 25: note = Any amino acid
  VARIANT 26: note = Any amino acid
  VARIANT 27: note = Any amino acid
  VARIANT 28: note = Any amino acid
  VARIANT 29: note = Any amino acid
  VARIANT 30: note = Any amino acid
  VARIANT 32: note = Any amino acid
  VARIANT 33: note = Any amino acid
  VARIANT 34: note = Any amino acid
  VARIANT 35: note = Any amino acid
  VARIANT 36: note = Any amino acid
  VARIANT 37: note = Any amino acid
  VARIANT 38: note = Any amino acid
  VARIANT 41: note = Any amino acid
  VARIANT 42: note = Any amino acid
  VARIANT 43: note = Any amino acid
  VARIANT 44: note = Any amino acid
  VARIANT 45: note = Any amino acid
  VARIANT 46: note = Any amino acid
  VARIANT 47: note = Any amino acid
  VARIANT 48: note = Any amino acid
  VARIANT 49: note = Any amino acid
  VARIANT 50: note = Any amino acid
  VARIANT 51: note = Any amino acid
GXXXXXXXXXXXXXXXXXXXXXXXXXXXXXGXXXXXXXSSXXXXXXXXXXXC

SEQ ID NO: 798074 - protein, 51 aa, unidentified
  VARIANT 2: note = Any amino acid
  VARIANT 3: note = Any amino acid
  VARIANT 4: note = Any amino acid
  VARIANT 5: note = Any amino acid
  VARIANT 6: note = Any amino acid
  VARIANT 7: note = Any amino acid
  VARIANT 8: note = Any amino acid
  VARIANT 9: note = Any amino acid
  VARIANT 10: note = Any amino acid
  VARIANT 11: note = Any amino acid
  VARIANT 12: note = Any amino acid
  VARIANT 13: note = Any amino acid
  VARIANT 14: note = Any amino acid
  VARIANT 15: note = Any amino acid
  VARIANT 16: note = Any amino acid
  VARIANT 17: note = Any amino acid
  VARIANT 18: note = Any amino acid
  VARIANT 19: note = Any amino acid
  VARIANT 20: note = Any amino acid
  VARIANT 21: note = Any amino acid
  VARIANT 22: note = Any amino acid
  VARIANT 23: note = Any amino acid
  VARIANT 24: note = Any amino acid
  VARIANT 25: note = Any amino acid
  VARIANT 26: note = Any amino acid
  VARIANT 27: note = Any amino acid
  VARIANT 28: note = Any amino acid
  VARIANT 29: note = Any amino acid
  VARIANT 30: note = Any amino acid
  VARIANT 32: note = Any amino acid
  VARIANT 33: note = Any amino acid
  VARIANT 34: note = Any amino acid
  VARIANT 35: note = Any amino acid
  VARIANT 36: note = Any amino acid
  VARIANT 37: note = Any amino acid
  VARIANT 38: note = Any amino acid
  VARIANT 41: note = Any amino acid
  VARIANT 42: note = Any amino acid
  VARIANT 43: note = Any amino acid
  VARIANT 44: note = Any amino acid
  VARIANT 45: note = Any amino acid
  VARIANT 46: note = Any amino acid
  VARIANT 47: note = Any amino acid
  VARIANT 48: note = Any amino acid
  VARIANT 49: note = Any amino acid
  VARIANT 50: note = Any amino acid
GXXXXXXXXXXXXXXXXXXXXXXXXXXXXXMXXXXXXXSGXXXXXXXXXXG

SEQ ID NO: 798075 - protein, 53 aa, unidentified
  VARIANT 2: note = Any amino acid
  VARIANT 3: note = Any amino acid
  VARIANT 4: note = Any amino acid
  VARIANT 5: note = Any amino acid
  VARIANT 6: note = Any amino acid
  VARIANT 7: note = Any amino acid
  VARIANT 8: note = Any amino acid
  VARIANT 9: note = Any amino acid
  VARIANT 10: note = Any amino acid
  VARIANT 11: note = Any amino acid
  VARIANT 12: note = Any amino acid
  VARIANT 13: note = Any amino acid
  VARIANT 14: note = Any amino acid
  VARIANT 15: note = Any amino acid
  VARIANT 16: note = Any amino acid
  VARIANT 17: note = Any amino acid
  VARIANT 18: note = Any amino acid
  VARIANT 19: note = Any amino acid
  VARIANT 20: note = Any amino acid
  VARIANT 21: note = Any amino acid
  VARIANT 22: note = Any amino acid
  VARIANT 23: note = Any amino acid
  VARIANT 24: note = Any amino acid
  VARIANT 25: note = Any amino acid
  VARIANT 26: note = Any amino acid
  VARIANT 27: note = Any amino acid
  VARIANT 28: note = Any amino acid
  VARIANT 29: note = Any amino acid
  VARIANT 30: note = Any amino acid
  VARIANT 32: note = Any amino acid
  VARIANT 33: note = Any amino acid
  VARIANT 34: note = Any amino acid
  VARIANT 35: note = Any amino acid
  VARIANT 36: note = Any amino acid
  VARIANT 37: note = Any amino acid
  VARIANT 38: note = Any amino acid
  VARIANT 41: note = Any amino acid
  VARIANT 42: note = Any amino acid
  VARIANT 43: note = Any amino acid
  VARIANT 44: note = Any amino acid
  VARIANT 45: note = Any amino acid
  VARIANT 46: note = Any amino acid
  VARIANT 47: note = Any amino acid
  VARIANT 48: note = Any amino acid
  VARIANT 49: note = Any amino acid
  VARIANT 50: note = Any amino acid
  VARIANT 51: note = Any amino acid
  VARIANT 52: note = Any amino acid
GXXXXXXXXXXXXXXXXXXXXXXXXXXXXXGXXXXXXXTNXXXXXXXXXXXXG

SEQ ID NO: 798076 - protein, 52 aa, unidentified
  VARIANT 2: note = Any amino acid
  VARIANT 3: note = Any amino acid
  VARIANT 4: note = Any amino acid
  VARIANT 5: note = Any amino acid
  VARIANT 6: note = Any amino acid
  VARIANT 7: note = Any amino acid
  VARIANT 8: note = Any amino acid
  VARIANT 9: note = Any amino acid
  VARIANT 10: note = Any amino acid
  VARIANT 11: note = Any amino acid
  VARIANT 12: note = Any amino acid
  VARIANT 13: note = Any amino acid
  VARIANT 14: note = Any amino acid
  VARIANT 15: note = Any amino acid
  VARIANT 16: note = Any amino acid
  VARIANT 17: note = Any amino acid
  VARIANT 18: note = Any amino acid
  VARIANT 19: note = Any amino acid
  VARIANT 20: note = Any amino acid
  VARIANT 21: note = Any amino acid
  VARIANT 22: note = Any amino acid
  VARIANT 23: note = Any amino acid
  VARIANT 24: note = Any amino acid
  VARIANT 25: note = Any amino acid
  VARIANT 26: note = Any amino acid
  VARIANT 27: note = Any amino acid
  VARIANT 28: note = Any amino acid
  VARIANT 29: note = Any amino acid
  VARIANT 30: note = Any amino acid
  VARIANT 32: note = Any amino acid
  VARIANT 33: note = Any amino acid
  VARIANT 34: note = Any amino acid
  VARIANT 35: note = Any amino acid
  VARIANT 36: note = Any amino acid
  VARIANT 37: note = Any amino acid
  VARIANT 38: note = Any amino acid
  VARIANT 41: note = Any amino acid
  VARIANT 42: note = Any amino acid
  VARIANT 43: note = Any amino acid
  VARIANT 44: note = Any amino acid
  VARIANT 45: note = Any amino acid
  VARIANT 46: note = Any amino acid
  VARIANT 47: note = Any amino acid
  VARIANT 48: note = Any amino acid
  VARIANT 49: note = Any amino acid
  VARIANT 50: note = Any amino acid
  VARIANT 51: note = Any amino acid
AXXXXXXXXXXXXXXXXXXXXXXXXXXXXXGXXXXXXXTGXXXXXXXXXXXG

SEQ ID NO: 798077 - protein, 53 aa, unidentified
  VARIANT 2: note = Any amino acid
  VARIANT 3: note = Any amino acid
  VARIANT 4: note = Any amino acid
  VARIANT 5: note = Any amino acid
  VARIANT 6: note = Any amino acid
  VARIANT 7: note = Any amino acid
  VARIANT 8: note = Any amino acid
  VARIANT 9: note = Any amino acid
  VARIANT 10: note = Any amino acid
  VARIANT 11: note = Any amino acid
  VARIANT 12: note = Any amino acid
  VARIANT 13: note = Any amino acid
  VARIANT 14: note = Any amino acid
  VARIANT 15: note = Any amino acid
  VARIANT 16: note = Any amino acid
  VARIANT 17: note = Any amino acid
  VARIANT 18: note = Any amino acid
  VARIANT 19: note = Any amino acid
  VARIANT 20: note = Any amino acid
  VARIANT 21: note = Any amino acid
  VARIANT 22: note = Any amino acid
  VARIANT 23: note = Any amino acid
  VARIANT 24: note = Any amino acid
  VARIANT 25: note = Any amino acid
  VARIANT 26: note = Any amino acid
  VARIANT 27: note = Any amino acid
  VARIANT 28: note = Any amino acid
  VARIANT 29: note = Any amino acid
  VARIANT 30: note = Any amino acid
  VARIANT 32: note = Any amino acid
  VARIANT 33: note = Any amino acid
  VARIANT 34: note = Any amino acid
  VARIANT 35: note = Any amino acid
  VARIANT 36: note = Any amino acid
  VARIANT 37: note = Any amino acid
  VARIANT 38: note = Any amino acid
  VARIANT 41: note = Any amino acid
  VARIANT 42: note = Any amino acid
  VARIANT 43: note = Any amino acid
  VARIANT 44: note = Any amino acid
  VARIANT 45: note = Any amino acid
  VARIANT 46: note = Any amino acid
  VARIANT 47: note = Any amino acid
  VARIANT 48: note = Any amino acid
  VARIANT 49: note = Any amino acid
  VARIANT 50: note = Any amino acid
  VARIANT 51: note = Any amino acid
  VARIANT 52: note = Any amino acid
CXXXXXXXXXXXXXXXXXXXXXXXXXXXXXGXXXXXXXSAXXXXXXXXXXXXK

SEQ ID NO: 798078 - protein, 52 aa, unidentified
  VARIANT 2: note = Any amino acid
  VARIANT 3: note = Any amino acid
  VARIANT 4: note = Any amino acid
  VARIANT 5: note = Any amino acid
  VARIANT 6: note = Any amino acid
  VARIANT 7: note = Any amino acid
  VARIANT 8: note = Any amino acid
  VARIANT 9: note = Any amino acid
  VARIANT 10: note = Any amino acid
  VARIANT 11: note = Any amino acid
  VARIANT 12: note = Any amino acid
  VARIANT 13: note = Any amino acid
  VARIANT 14: note = Any amino acid
  VARIANT 15: note = Any amino acid
  VARIANT 16: note = Any amino acid
  VARIANT 17: note = Any amino acid
  VARIANT 18: note = Any amino acid
  VARIANT 19: note = Any amino acid
  VARIANT 20: note = Any amino acid
  VARIANT 21: note = Any amino acid
  VARIANT 22: note = Any amino acid
  VARIANT 23: note = Any amino acid
  VARIANT 24: note = Any amino acid
  VARIANT 25: note = Any amino acid
  VARIANT 26: note = Any amino acid
  VARIANT 27: note = Any amino acid
  VARIANT 28: note = Any amino acid
  VARIANT 29: note = Any amino acid
  VARIANT 30: note = Any amino acid
  VARIANT 32: note = Any amino acid
  VARIANT 33: note = Any amino acid
  VARIANT 34: note = Any amino acid
  VARIANT 35: note = Any amino acid
  VARIANT 36: note = Any amino acid
  VARIANT 37: note = Any amino acid
  VARIANT 38: note = Any amino acid
  VARIANT 41: note = Any amino acid
  VARIANT 42: note = Any amino acid
  VARIANT 43: note = Any amino acid
  VARIANT 44: note = Any amino acid
  VARIANT 45: note = Any amino acid
  VARIANT 46: note = Any amino acid
  VARIANT 47: note = Any amino acid
  VARIANT 48: note = Any amino acid
  VARIANT 49: note = Any amino acid
  VARIANT 50: note = Any amino acid
  VARIANT 51: note = Any amino acid
GXXXXXXXXXXXXXXXXXXXXXXXXXXXXXGXXXXXXXTGXXXXXXXXXXXH

SEQ ID NO: 798079 - protein, 52 aa, unidentified
  VARIANT 2: note = Any amino acid
  VARIANT 3: note = Any amino acid
  VARIANT 4: note = Any amino acid
  VARIANT 5: note = Any amino acid
  VARIANT 6: note = Any amino acid
  VARIANT 7: note = Any amino acid
  VARIANT 8: note = Any amino acid
  VARIANT 9: note = Any amino acid
  VARIANT 10: note = Any amino acid
  VARIANT 11: note = Any amino acid
  VARIANT 12: note = Any amino acid
  VARIANT 13: note = Any amino acid
  VARIANT 14: note = Any amino acid
  VARIANT 15: note = Any amino acid
  VARIANT 16: note = Any amino acid
  VARIANT 17: note = Any amino acid
  VARIANT 18: note = Any amino acid
  VARIANT 19: note = Any amino acid
  VARIANT 20: note = Any amino acid
  VARIANT 21: note = Any amino acid
  VARIANT 22: note = Any amino acid
  VARIANT 23: note = Any amino acid
  VARIANT 24: note = Any amino acid
  VARIANT 25: note = Any amino acid
  VARIANT 26: note = Any amino acid
  VARIANT 27: note = Any amino acid
  VARIANT 28: note = Any amino acid
  VARIANT 29: note = Any amino acid
  VARIANT 30: note = Any amino acid
  VARIANT 32: note = Any amino acid
  VARIANT 33: note = Any amino acid
  VARIANT 34: note = Any amino acid
  VARIANT 35: note = Any amino acid
  VARIANT 36: note = Any amino acid
  VARIANT 37: note = Any amino acid
  VARIANT 38: note = Any amino acid
  VARIANT 41: note = Any amino acid
  VARIANT 42: note = Any amino acid
  VARIANT 43: note = Any amino acid
  VARIANT 44: note = Any amino acid
  VARIANT 45: note = Any amino acid
  VARIANT 46: note = Any amino acid
  VARIANT 47: note = Any amino acid
  VARIANT 48: note = Any amino acid
  VARIANT 49: note = Any amino acid
  VARIANT 50: note = Any amino acid
  VARIANT 51: note = Any amino acid
GXXXXXXXXXXXXXXXXXXXXXXXXXXXXXGXXXXXXXSGXXXXXXXXXXXI

SEQ ID NO: 798080 - protein, 53 aa, unidentified
  VARIANT 2: note = Any amino acid
  VARIANT 3: note = Any amino acid
  VARIANT 4: note = Any amino acid
  VARIANT 5: note = Any amino acid
  VARIANT 6: note = Any amino acid
  VARIANT 7: note = Any amino acid
  VARIANT 8: note = Any amino acid
  VARIANT 9: note = Any amino acid
  VARIANT 10: note = Any amino acid
  VARIANT 11: note = Any amino acid
  VARIANT 12: note = Any amino acid
  VARIANT 13: note = Any amino acid
  VARIANT 14: note = Any amino acid
  VARIANT 15: note = Any amino acid
  VARIANT 16: note = Any amino acid
  VARIANT 17: note = Any amino acid
  VARIANT 18: note = Any amino acid
  VARIANT 19: note = Any amino acid
  VARIANT 20: note = Any amino acid
  VARIANT 21: note = Any amino acid
  VARIANT 22: note = Any amino acid
  VARIANT 23: note = Any amino acid
  VARIANT 24: note = Any amino acid
  VARIANT 25: note = Any amino acid
  VARIANT 26: note = Any amino acid
  VARIANT 27: note = Any amino acid
  VARIANT 28: note = Any amino acid
  VARIANT 29: note = Any amino acid
  VARIANT 30: note = Any amino acid
  VARIANT 32: note = Any amino acid
  VARIANT 33: note = Any amino acid
  VARIANT 34: note = Any amino acid
  VARIANT 35: note = Any amino acid
  VARIANT 36: note = Any amino acid
  VARIANT 37: note = Any amino acid
  VARIANT 38: note = Any amino acid
  VARIANT 41: note = Any amino acid
  VARIANT 42: note = Any amino acid
  VARIANT 43: note = Any amino acid
  VARIANT 44: note = Any amino acid
  VARIANT 45: note = Any amino acid
  VARIANT 46: note = Any amino acid
  VARIANT 47: note = Any amino acid
  VARIANT 48: note = Any amino acid
  VARIANT 49: note = Any amino acid
  VARIANT 50: note = Any amino acid
  VARIANT 51: note = Any amino acid
  VARIANT 52: note = Any amino acid
YXXXXXXXXXXXXXXXXXXXXXXXXXXXXXGXXXXXXXSAXXXXXXXXXXXXR

SEQ ID NO: 798081 - protein, 53 aa, unidentified
  VARIANT 2: note = Any amino acid
  VARIANT 3: note = Any amino acid
  VARIANT 4: note = Any amino acid
  VARIANT 5: note = Any amino acid
  VARIANT 6: note = Any amino acid
  VARIANT 7: note = Any amino acid
  VARIANT 8: note = Any amino acid
  VARIANT 9: note = Any amino acid
  VARIANT 10: note = Any amino acid
  VARIANT 11: note = Any amino acid
  VARIANT 12: note = Any amino acid
  VARIANT 13: note = Any amino acid
  VARIANT 14: note = Any amino acid
  VARIANT 15: note = Any amino acid
  VARIANT 16: note = Any amino acid
  VARIANT 17: note = Any amino acid
  VARIANT 18: note = Any amino acid
  VARIANT 19: note = Any amino acid
  VARIANT 20: note = Any amino acid
  VARIANT 21: note = Any amino acid
  VARIANT 22: note = Any amino acid
  VARIANT 23: note = Any amino acid
  VARIANT 24: note = Any amino acid
  VARIANT 25: note = Any amino acid
  VARIANT 26: note = Any amino acid
  VARIANT 27: note = Any amino acid
  VARIANT 28: note = Any amino acid
  VARIANT 29: note = Any amino acid
  VARIANT 30: note = Any amino acid
  VARIANT 32: note = Any amino acid
  VARIANT 33: note = Any amino acid
  VARIANT 34: note = Any amino acid
  VARIANT 35: note = Any amino acid
  VARIANT 36: note = Any amino acid
  VARIANT 37: note = Any amino acid
  VARIANT 38: note = Any amino acid
  VARIANT 41: note = Any amino acid
  VARIANT 42: note = Any amino acid
  VARIANT 43: note = Any amino acid
  VARIANT 44: note = Any amino acid
  VARIANT 45: note = Any amino acid
  VARIANT 46: note = Any amino acid
  VARIANT 47: note = Any amino acid
  VARIANT 48: note = Any amino acid
  VARIANT 49: note = Any amino acid
  VARIANT 50: note = Any amino acid
  VARIANT 51: note = Any amino acid
  VARIANT 52: note = Any amino acid
GXXXXXXXXXXXXXXXXXXXXXXXXXXXXXGXXXXXXXSAXXXXXXXXXXXXR

SEQ ID NO: 798082 - protein, 52 aa, unidentified
  VARIANT 2: note = Any amino acid
  VARIANT 3: note = Any amino acid
  VARIANT 4: note = Any amino acid
  VARIANT 5: note = Any amino acid
  VARIANT 6: note = Any amino acid
  VARIANT 7: note = Any amino acid
  VARIANT 8: note = Any amino acid
  VARIANT 9: note = Any amino acid
  VARIANT 10: note = Any amino acid
  VARIANT 11: note = Any amino acid
  VARIANT 12: note = Any amino acid
  VARIANT 13: note = Any amino acid
  VARIANT 14: note = Any amino acid
  VARIANT 15: note = Any amino acid
  VARIANT 16: note = Any amino acid
  VARIANT 17: note = Any amino acid
  VARIANT 18: note = Any amino acid
  VARIANT 19: note = Any amino acid
  VARIANT 20: note = Any amino acid
  VARIANT 21: note = Any amino acid
  VARIANT 22: note = Any amino acid
  VARIANT 23: note = Any amino acid
  VARIANT 24: note = Any amino acid
  VARIANT 25: note = Any amino acid
  VARIANT 26: note = Any amino acid
  VARIANT 27: note = Any amino acid
  VARIANT 28: note = Any amino acid
  VARIANT 29: note = Any amino acid
  VARIANT 30: note = Any amino acid
  VARIANT 32: note = Any amino acid
  VARIANT 33: note = Any amino acid
  VARIANT 34: note = Any amino acid
  VARIANT 35: note = Any amino acid
  VARIANT 36: note = Any amino acid
  VARIANT 37: note = Any amino acid
  VARIANT 38: note = Any amino acid
  VARIANT 41: note = Any amino acid
  VARIANT 42: note = Any amino acid
  VARIANT 43: note = Any amino acid
  VARIANT 44: note = Any amino acid
  VARIANT 45: note = Any amino acid
  VARIANT 46: note = Any amino acid
  VARIANT 47: note = Any amino acid
  VARIANT 48: note = Any amino acid
  VARIANT 49: note = Any amino acid
  VARIANT 50: note = Any amino acid
  VARIANT 51: note = Any amino acid
CXXXXXXXXXXXXXXXXXXXXXXXXXXXXXGXXXXXXXSAXXXXXXXXXXXG

SEQ ID NO: 798083 - protein, 52 aa, unidentified
  VARIANT 2: note = Any amino acid
  VARIANT 3: note = Any amino acid
  VARIANT 4: note = Any amino acid
  VARIANT 5: note = Any amino acid
  VARIANT 6: note = Any amino acid
  VARIANT 7: note = Any amino acid
  VARIANT 8: note = Any amino acid
  VARIANT 9: note = Any amino acid
  VARIANT 10: note = Any amino acid
  VARIANT 11: note = Any amino acid
  VARIANT 12: note = Any amino acid
  VARIANT 13: note = Any amino acid
  VARIANT 14: note = Any amino acid
  VARIANT 15: note = Any amino acid
  VARIANT 16: note = Any amino acid
  VARIANT 17: note = Any amino acid
  VARIANT 18: note = Any amino acid
  VARIANT 19: note = Any amino acid
  VARIANT 20: note = Any amino acid
  VARIANT 21: note = Any amino acid
  VARIANT 22: note = Any amino acid
  VARIANT 23: note = Any amino acid
  VARIANT 24: note = Any amino acid
  VARIANT 25: note = Any amino acid
  VARIANT 26: note = Any amino acid
  VARIANT 27: note = Any amino acid
  VARIANT 28: note = Any amino acid
  VARIANT 29: note = Any amino acid
  VARIANT 30: note = Any amino acid
  VARIANT 32: note = Any amino acid
  VARIANT 33: note = Any amino acid
  VARIANT 34: note = Any amino acid
  VARIANT 35: note = Any amino acid
  VARIANT 36: note = Any amino acid
  VARIANT 37: note = Any amino acid
  VARIANT 38: note = Any amino acid
  VARIANT 41: note = Any amino acid
  VARIANT 42: note = Any amino acid
  VARIANT 43: note = Any amino acid
  VARIANT 44: note = Any amino acid
  VARIANT 45: note = Any amino acid
  VARIANT 46: note = Any amino acid
  VARIANT 47: note = Any amino acid
  VARIANT 48: note = Any amino acid
  VARIANT 49: note = Any amino acid
  VARIANT 50: note = Any amino acid
  VARIANT 51: note = Any amino acid
GXXXXXXXXXXXXXXXXXXXXXXXXXXXXXGXXXXXXXAGXXXXXXXXXXXG

SEQ ID NO: 798084 - protein, 51 aa, unidentified
  VARIANT 2: note = Any amino acid
  VARIANT 3: note = Any amino acid
  VARIANT 4: note = Any amino acid
  VARIANT 5: note = Any amino acid
  VARIANT 6: note = Any amino acid
  VARIANT 7: note = Any amino acid
  VARIANT 8: note = Any amino acid
  VARIANT 9: note = Any amino acid
  VARIANT 10: note = Any amino acid
  VARIANT 11: note = Any amino acid
  VARIANT 12: note = Any amino acid
  VARIANT 13: note = Any amino acid
  VARIANT 14: note = Any amino acid
  VARIANT 15: note = Any amino acid
  VARIANT 16: note = Any amino acid
  VARIANT 17: note = Any amino acid
  VARIANT 18: note = Any amino acid
  VARIANT 19: note = Any amino acid
  VARIANT 20: note = Any amino acid
  VARIANT 21: note = Any amino acid
  VARIANT 22: note = Any amino acid
  VARIANT 23: note = Any amino acid
  VARIANT 24: note = Any amino acid
  VARIANT 25: note = Any amino acid
  VARIANT 26: note = Any amino acid
  VARIANT 27: note = Any amino acid
  VARIANT 28: note = Any amino acid
  VARIANT 29: note = Any amino acid
  VARIANT 30: note = Any amino acid
  VARIANT 32: note = Any amino acid
  VARIANT 33: note = Any amino acid
  VARIANT 34: note = Any amino acid
  VARIANT 35: note = Any amino acid
  VARIANT 36: note = Any amino acid
  VARIANT 37: note = Any amino acid
  VARIANT 38: note = Any amino acid
  VARIANT 41: note = Any amino acid
  VARIANT 42: note = Any amino acid
  VARIANT 43: note = Any amino acid
  VARIANT 44: note = Any amino acid
  VARIANT 45: note = Any amino acid
  VARIANT 46: note = Any amino acid
  VARIANT 47: note = Any amino acid
  VARIANT 48: note = Any amino acid
  VARIANT 49: note = Any amino acid
  VARIANT 50: note = Any amino acid
GXXXXXXXXXXXXXXXXXXXXXXXXXXXXXMXXXXXXXSDXXXXXXXXXXG

SEQ ID NO: 798085 - protein, 52 aa, unidentified
  VARIANT 2: note = Any amino acid
  VARIANT 3: note = Any amino acid
  VARIANT 4: note = Any amino acid
  VARIANT 5: note = Any amino acid
  VARIANT 6: note = Any amino acid
  VARIANT 7: note = Any amino acid
  VARIANT 8: note = Any amino acid
  VARIANT 9: note = Any amino acid
  VARIANT 10: note = Any amino acid
  VARIANT 11: note = Any amino acid
  VARIANT 12: note = Any amino acid
  VARIANT 13: note = Any amino acid
  VARIANT 14: note = Any amino acid
  VARIANT 15: note = Any amino acid
  VARIANT 16: note = Any amino acid
  VARIANT 17: note = Any amino acid
  VARIANT 18: note = Any amino acid
  VARIANT 19: note = Any amino acid
  VARIANT 20: note = Any amino acid
  VARIANT 21: note = Any amino acid
  VARIANT 22: note = Any amino acid
  VARIANT 23: note = Any amino acid
  VARIANT 24: note = Any amino acid
  VARIANT 25: note = Any amino acid
  VARIANT 26: note = Any amino acid
  VARIANT 27: note = Any amino acid
  VARIANT 28: note = Any amino acid
  VARIANT 29: note = Any amino acid
  VARIANT 30: note = Any amino acid
  VARIANT 32: note = Any amino acid
  VARIANT 33: note = Any amino acid
  VARIANT 34: note = Any amino acid
  VARIANT 35: note = Any amino acid
  VARIANT 36: note = Any amino acid
  VARIANT 37: note = Any amino acid
  VARIANT 38: note = Any amino acid
  VARIANT 41: note = Any amino acid
  VARIANT 42: note = Any amino acid
  VARIANT 43: note = Any amino acid
  VARIANT 44: note = Any amino acid
  VARIANT 45: note = Any amino acid
  VARIANT 46: note = Any amino acid
  VARIANT 47: note = Any amino acid
  VARIANT 48: note = Any amino acid
  VARIANT 49: note = Any amino acid
  VARIANT 50: note = Any amino acid
  VARIANT 51: note = Any amino acid
CXXXXXXXXXXXXXXXXXXXXXXXXXXXXXGXXXXXXXSAXXXXXXXXXXXC

SEQ ID NO: 798086 - protein, 52 aa, unidentified
  VARIANT 2: note = Any amino acid
  VARIANT 3: note = Any amino acid
  VARIANT 4: note = Any amino acid
  VARIANT 5: note = Any amino acid
  VARIANT 6: note = Any amino acid
  VARIANT 7: note = Any amino acid
  VARIANT 8: note = Any amino acid
  VARIANT 9: note = Any amino acid
  VARIANT 10: note = Any amino acid
  VARIANT 11: note = Any amino acid
  VARIANT 12: note = Any amino acid
  VARIANT 13: note = Any amino acid
  VARIANT 14: note = Any amino acid
  VARIANT 15: note = Any amino acid
  VARIANT 16: note = Any amino acid
  VARIANT 17: note = Any amino acid
  VARIANT 18: note = Any amino acid
  VARIANT 19: note = Any amino acid
  VARIANT 20: note = Any amino acid
  VARIANT 21: note = Any amino acid
  VARIANT 22: note = Any amino acid
  VARIANT 23: note = Any amino acid
  VARIANT 24: note = Any amino acid
  VARIANT 25: note = Any amino acid
  VARIANT 26: note = Any amino acid
  VARIANT 27: note = Any amino acid
  VARIANT 28: note = Any amino acid
  VARIANT 29: note = Any amino acid
  VARIANT 30: note = Any amino acid
  VARIANT 32: note = Any amino acid
  VARIANT 33: note = Any amino acid
  VARIANT 34: note = Any amino acid
  VARIANT 35: note = Any amino acid
  VARIANT 36: note = Any amino acid
  VARIANT 37: note = Any amino acid
  VARIANT 38: note = Any amino acid
  VARIANT 41: note = Any amino acid
  VARIANT 42: note = Any amino acid
  VARIANT 43: note = Any amino acid
  VARIANT 44: note = Any amino acid
  VARIANT 45: note = Any amino acid
  VARIANT 46: note = Any amino acid
  VARIANT 47: note = Any amino acid
  VARIANT 48: note = Any amino acid
  VARIANT 49: note = Any amino acid
  VARIANT 50: note = Any amino acid
  VARIANT 51: note = Any amino acid
GXXXXXXXXXXXXXXXXXXXXXXXXXXXXXAXXXXXXXSAXXXXXXXXXXXG

SEQ ID NO: 798087 - protein, 52 aa, unidentified
  VARIANT 2: note = Any amino acid
  VARIANT 3: note = Any amino acid
  VARIANT 4: note = Any amino acid
  VARIANT 5: note = Any amino acid
  VARIANT 6: note = Any amino acid
  VARIANT 7: note = Any amino acid
  VARIANT 8: note = Any amino acid
  VARIANT 9: note = Any amino acid
  VARIANT 10: note = Any amino acid
  VARIANT 11: note = Any amino acid
  VARIANT 12: note = Any amino acid
  VARIANT 13: note = Any amino acid
  VARIANT 14: note = Any amino acid
  VARIANT 15: note = Any amino acid
  VARIANT 16: note = Any amino acid
  VARIANT 17: note = Any amino acid
  VARIANT 18: note = Any amino acid
  VARIANT 19: note = Any amino acid
  VARIANT 20: note = Any amino acid
  VARIANT 21: note = Any amino acid
  VARIANT 22: note = Any amino acid
  VARIANT 23: note = Any amino acid
  VARIANT 24: note = Any amino acid
  VARIANT 25: note = Any amino acid
  VARIANT 26: note = Any amino acid
  VARIANT 27: note = Any amino acid
  VARIANT 28: note = Any amino acid
  VARIANT 29: note = Any amino acid
  VARIANT 30: note = Any amino acid
  VARIANT 32: note = Any amino acid
  VARIANT 33: note = Any amino acid
  VARIANT 34: note = Any amino acid
  VARIANT 35: note = Any amino acid
  VARIANT 36: note = Any amino acid
  VARIANT 37: note = Any amino acid
  VARIANT 38: note = Any amino acid
  VARIANT 41: note = Any amino acid
  VARIANT 42: note = Any amino acid
  VARIANT 43: note = Any amino acid
  VARIANT 44: note = Any amino acid
  VARIANT 45: note = Any amino acid
  VARIANT 46: note = Any amino acid
  VARIANT 47: note = Any amino acid
  VARIANT 48: note = Any amino acid
  VARIANT 49: note = Any amino acid
  VARIANT 50: note = Any amino acid
  VARIANT 51: note = Any amino acid
GXXXXXXXXXXXXXXXXXXXXXXXXXXXXXGXXXXXXXTDXXXXXXXXXXXG

SEQ ID NO: 798088 - protein, 52 aa, unidentified
  VARIANT 2: note = Any amino acid
  VARIANT 3: note = Any amino acid
  VARIANT 4: note = Any amino acid
  VARIANT 5: note = Any amino acid
  VARIANT 6: note = Any amino acid
  VARIANT 7: note = Any amino acid
  VARIANT 8: note = Any amino acid
  VARIANT 9: note = Any amino acid
  VARIANT 10: note = Any amino acid
  VARIANT 11: note = Any amino acid
  VARIANT 12: note = Any amino acid
  VARIANT 13: note = Any amino acid
  VARIANT 14: note = Any amino acid
  VARIANT 15: note = Any amino acid
  VARIANT 16: note = Any amino acid
  VARIANT 17: note = Any amino acid
  VARIANT 18: note = Any amino acid
  VARIANT 19: note = Any amino acid
  VARIANT 20: note = Any amino acid
  VARIANT 21: note = Any amino acid
  VARIANT 22: note = Any amino acid
  VARIANT 23: note = Any amino acid
  VARIANT 24: note = Any amino acid
  VARIANT 25: note = Any amino acid
  VARIANT 26: note = Any amino acid
  VARIANT 27: note = Any amino acid
  VARIANT 28: note = Any amino acid
  VARIANT 29: note = Any amino acid
  VARIANT 30: note = Any amino acid
  VARIANT 32: note = Any amino acid
  VARIANT 33: note = Any amino acid
  VARIANT 34: note = Any amino acid
  VARIANT 35: note = Any amino acid
  VARIANT 36: note = Any amino acid
  VARIANT 37: note = Any amino acid
  VARIANT 38: note = Any amino acid
  VARIANT 41: note = Any amino acid
  VARIANT 42: note = Any amino acid
  VARIANT 43: note = Any amino acid
  VARIANT 44: note = Any amino acid
  VARIANT 45: note = Any amino acid
  VARIANT 46: note = Any amino acid
  VARIANT 47: note = Any amino acid
  VARIANT 48: note = Any amino acid
  VARIANT 49: note = Any amino acid
  VARIANT 50: note = Any amino acid
  VARIANT 51: note = Any amino acid
GXXXXXXXXXXXXXXXXXXXXXXXXXXXXXSXXXXXXXSGXXXXXXXXXXXG

SEQ ID NO: 798089 - protein, 52 aa, unidentified
  VARIANT 2: note = Any amino acid
  VARIANT 3: note = Any amino acid
  VARIANT 4: note = Any amino acid
  VARIANT 5: note = Any amino acid
  VARIANT 6: note = Any amino acid
  VARIANT 7: note = Any amino acid
  VARIANT 8: note = Any amino acid
  VARIANT 9: note = Any amino acid
  VARIANT 10: note = Any amino acid
  VARIANT 11: note = Any amino acid
  VARIANT 12: note = Any amino acid
  VARIANT 13: note = Any amino acid
  VARIANT 14: note = Any amino acid
  VARIANT 15: note = Any amino acid
  VARIANT 16: note = Any amino acid
  VARIANT 17: note = Any amino acid
  VARIANT 18: note = Any amino acid
  VARIANT 19: note = Any amino acid
  VARIANT 20: note = Any amino acid
  VARIANT 21: note = Any amino acid
  VARIANT 22: note = Any amino acid
  VARIANT 23: note = Any amino acid
  VARIANT 24: note = Any amino acid
  VARIANT 25: note = Any amino acid
  VARIANT 26: note = Any amino acid
  VARIANT 27: note = Any amino acid
  VARIANT 28: note = Any amino acid
  VARIANT 29: note = Any amino acid
  VARIANT 30: note = Any amino acid
  VARIANT 32: note = Any amino acid
  VARIANT 33: note = Any amino acid
  VARIANT 34: note = Any amino acid
  VARIANT 35: note = Any amino acid
  VARIANT 36: note = Any amino acid
  VARIANT 37: note = Any amino acid
  VARIANT 38: note = Any amino acid
  VARIANT 41: note = Any amino acid
  VARIANT 42: note = Any amino acid
  VARIANT 43: note = Any amino acid
  VARIANT 44: note = Any amino acid
  VARIANT 45: note = Any amino acid
  VARIANT 46: note = Any amino acid
  VARIANT 47: note = Any amino acid
  VARIANT 48: note = Any amino acid
  VARIANT 49: note = Any amino acid
  VARIANT 50: note = Any amino acid
  VARIANT 51: note = Any amino acid
GXXXXXXXXXXXXXXXXXXXXXXXXXXXXXGXXXXXXXSGXXXXXXXXXXXN

SEQ ID NO: 798090 - protein, 52 aa, unidentified
  VARIANT 2: note = Any amino acid
  VARIANT 3: note = Any amino acid
  VARIANT 4: note = Any amino acid
  VARIANT 5: note = Any amino acid
  VARIANT 6: note = Any amino acid
  VARIANT 7: note = Any amino acid
  VARIANT 8: note = Any amino acid
  VARIANT 9: note = Any amino acid
  VARIANT 10: note = Any amino acid
  VARIANT 11: note = Any amino acid
  VARIANT 12: note = Any amino acid
  VARIANT 13: note = Any amino acid
  VARIANT 14: note = Any amino acid
  VARIANT 15: note = Any amino acid
  VARIANT 16: note = Any amino acid
  VARIANT 17: note = Any amino acid
  VARIANT 18: note = Any amino acid
  VARIANT 19: note = Any amino acid
  VARIANT 20: note = Any amino acid
  VARIANT 21: note = Any amino acid
  VARIANT 22: note = Any amino acid
  VARIANT 23: note = Any amino acid
  VARIANT 24: note = Any amino acid
  VARIANT 25: note = Any amino acid
  VARIANT 26: note = Any amino acid
  VARIANT 27: note = Any amino acid
  VARIANT 28: note = Any amino acid
  VARIANT 29: note = Any amino acid
  VARIANT 30: note = Any amino acid
  VARIANT 32: note = Any amino acid
  VARIANT 33: note = Any amino acid
  VARIANT 34: note = Any amino acid
  VARIANT 35: note = Any amino acid
  VARIANT 36: note = Any amino acid
  VARIANT 37: note = Any amino acid
  VARIANT 38: note = Any amino acid
  VARIANT 41: note = Any amino acid
  VARIANT 42: note = Any amino acid
  VARIANT 43: note = Any amino acid
  VARIANT 44: note = Any amino acid
  VARIANT 45: note = Any amino acid
  VARIANT 46: note = Any amino acid
  VARIANT 47: note = Any amino acid
  VARIANT 48: note = Any amino acid
  VARIANT 49: note = Any amino acid
  VARIANT 50: note = Any amino acid
  VARIANT 51: note = Any amino acid
AXXXXXXXXXXXXXXXXXXXXXXXXXXXXXGXXXXXXXSAXXXXXXXXXXXG

SEQ ID NO: 798091 - protein, 52 aa, unidentified
  VARIANT 2: note = Any amino acid
  VARIANT 3: note = Any amino acid
  VARIANT 4: note = Any amino acid
  VARIANT 5: note = Any amino acid
  VARIANT 6: note = Any amino acid
  VARIANT 7: note = Any amino acid
  VARIANT 8: note = Any amino acid
  VARIANT 9: note = Any amino acid
  VARIANT 10: note = Any amino acid
  VARIANT 11: note = Any amino acid
  VARIANT 12: note = Any amino acid
  VARIANT 13: note = Any amino acid
  VARIANT 14: note = Any amino acid
  VARIANT 15: note = Any amino acid
  VARIANT 16: note = Any amino acid
  VARIANT 17: note = Any amino acid
  VARIANT 18: note = Any amino acid
  VARIANT 19: note = Any amino acid
  VARIANT 20: note = Any amino acid
  VARIANT 21: note = Any amino acid
  VARIANT 22: note = Any amino acid
  VARIANT 23: note = Any amino acid
  VARIANT 24: note = Any amino acid
  VARIANT 25: note = Any amino acid
  VARIANT 26: note = Any amino acid
  VARIANT 27: note = Any amino acid
  VARIANT 28: note = Any amino acid
  VARIANT 29: note = Any amino acid
  VARIANT 30: note = Any amino acid
  VARIANT 32: note = Any amino acid
  VARIANT 33: note = Any amino acid
  VARIANT 34: note = Any amino acid
  VARIANT 35: note = Any amino acid
  VARIANT 36: note = Any amino acid
  VARIANT 37: note = Any amino acid
  VARIANT 38: note = Any amino acid
  VARIANT 41: note = Any amino acid
  VARIANT 42: note = Any amino acid
  VARIANT 43: note = Any amino acid
  VARIANT 44: note = Any amino acid
  VARIANT 45: note = Any amino acid
  VARIANT 46: note = Any amino acid
  VARIANT 47: note = Any amino acid
  VARIANT 48: note = Any amino acid
  VARIANT 49: note = Any amino acid
  VARIANT 50: note = Any amino acid
  VARIANT 51: note = Any amino acid
GXXXXXXXXXXXXXXXXXXXXXXXXXXXXXGXXXXXXXSGXXXXXXXXXXXF

SEQ ID NO: 798092 - protein, 57 aa, unidentified
  VARIANT 2: note = Any amino acid
  VARIANT 3: note = Any amino acid
  VARIANT 4: note = Any amino acid
  VARIANT 5: note = Any amino acid
  VARIANT 6: note = Any amino acid
  VARIANT 7: note = Any amino acid
  VARIANT 8: note = Any amino acid
  VARIANT 9: note = Any amino acid
  VARIANT 10: note = Any amino acid
  VARIANT 11: note = Any amino acid
  VARIANT 12: note = Any amino acid
  VARIANT 13: note = Any amino acid
  VARIANT 14: note = Any amino acid
  VARIANT 15: note = Any amino acid
  VARIANT 16: note = Any amino acid
  VARIANT 17: note = Any amino acid
  VARIANT 18: note = Any amino acid
  VARIANT 19: note = Any amino acid
  VARIANT 20: note = Any amino acid
  VARIANT 21: note = Any amino acid
  VARIANT 22: note = Any amino acid
  VARIANT 23: note = Any amino acid
  VARIANT 24: note = Any amino acid
  VARIANT 25: note = Any amino acid
  VARIANT 26: note = Any amino acid
  VARIANT 27: note = Any amino acid
  VARIANT 28: note = Any amino acid
  VARIANT 29: note = Any amino acid
  VARIANT 30: note = Any amino acid
  VARIANT 32: note = Any amino acid
  VARIANT 33: note = Any amino acid
  VARIANT 34: note = Any amino acid
  VARIANT 35: note = Any amino acid
  VARIANT 36: note = Any amino acid
  VARIANT 37: note = Any amino acid
  VARIANT 38: note = Any amino acid
  VARIANT 41: note = Any amino acid
  VARIANT 42: note = Any amino acid
  VARIANT 43: note = Any amino acid
  VARIANT 44: note = Any amino acid
  VARIANT 45: note = Any amino acid
  VARIANT 46: note = Any amino acid
  VARIANT 47: note = Any amino acid
  VARIANT 48: note = Any amino acid
  VARIANT 49: note = Any amino acid
  VARIANT 50: note = Any amino acid
  VARIANT 51: note = Any amino acid
  VARIANT 52: note = Any amino acid
  VARIANT 53: note = Any amino acid
  VARIANT 54: note = Any amino acid
  VARIANT 55: note = Any amino acid
  VARIANT 56: note = Any amino acid
GXXXXXXXXXXXXXXXXXXXXXXXXXXXXXLXXXXXXXSGXXXXXXXXXXXXXXXXG

SEQ ID NO: 798093 - protein, 50 aa, unidentified
  VARIANT 2: note = Any amino acid
  VARIANT 3: note = Any amino acid
  VARIANT 4: note = Any amino acid
  VARIANT 5: note = Any amino acid
  VARIANT 6: note = Any amino acid
  VARIANT 7: note = Any amino acid
  VARIANT 8: note = Any amino acid
  VARIANT 9: note = Any amino acid
  VARIANT 10: note = Any amino acid
  VARIANT 11: note = Any amino acid
  VARIANT 12: note = Any amino acid
  VARIANT 13: note = Any amino acid
  VARIANT 14: note = Any amino acid
  VARIANT 15: note = Any amino acid
  VARIANT 16: note = Any amino acid
  VARIANT 17: note = Any amino acid
  VARIANT 18: note = Any amino acid
  VARIANT 19: note = Any amino acid
  VARIANT 20: note = Any amino acid
  VARIANT 21: note = Any amino acid
  VARIANT 22: note = Any amino acid
  VARIANT 23: note = Any amino acid
  VARIANT 24: note = Any amino acid
  VARIANT 25: note = Any amino acid
  VARIANT 26: note = Any amino acid
  VARIANT 27: note = Any amino acid
  VARIANT 28: note = Any amino acid
  VARIANT 30: note = Any amino acid
  VARIANT 31: note = Any amino acid
  VARIANT 32: note = Any amino acid
  VARIANT 33: note = Any amino acid
  VARIANT 34: note = Any amino acid
  VARIANT 35: note = Any amino acid
  VARIANT 36: note = Any amino acid
  VARIANT 39: note = Any amino acid
  VARIANT 40: note = Any amino acid
  VARIANT 41: note = Any amino acid
  VARIANT 42: note = Any amino acid
  VARIANT 43: note = Any amino acid
  VARIANT 44: note = Any amino acid
  VARIANT 45: note = Any amino acid
  VARIANT 46: note = Any amino acid
  VARIANT 47: note = Any amino acid
  VARIANT 48: note = Any amino acid
  VARIANT 49: note = Any amino acid
GXXXXXXXXXXXXXXXXXXXXXXXXXXXGXXXXXXXTGXXXXXXXXXXXG

SEQ ID NO: 798094 - protein, 53 aa, unidentified
  VARIANT 2: note = Any amino acid
  VARIANT 3: note = Any amino acid
  VARIANT 4: note = Any amino acid
  VARIANT 5: note = Any amino acid
  VARIANT 6: note = Any amino acid
  VARIANT 7: note = Any amino acid
  VARIANT 8: note = Any amino acid
  VARIANT 9: note = Any amino acid
  VARIANT 10: note = Any amino acid
  VARIANT 11: note = Any amino acid
  VARIANT 12: note = Any amino acid
  VARIANT 13: note = Any amino acid
  VARIANT 14: note = Any amino acid
  VARIANT 15: note = Any amino acid
  VARIANT 16: note = Any amino acid
  VARIANT 17: note = Any amino acid
  VARIANT 18: note = Any amino acid
  VARIANT 19: note = Any amino acid
  VARIANT 20: note = Any amino acid
  VARIANT 21: note = Any amino acid
  VARIANT 22: note = Any amino acid
  VARIANT 23: note = Any amino acid
  VARIANT 24: note = Any amino acid
  VARIANT 25: note = Any amino acid
  VARIANT 26: note = Any amino acid
  VARIANT 27: note = Any amino acid
  VARIANT 28: note = Any amino acid
  VARIANT 29: note = Any amino acid
  VARIANT 30: note = Any amino acid
  VARIANT 32: note = Any amino acid
  VARIANT 33: note = Any amino acid
  VARIANT 34: note = Any amino acid
  VARIANT 35: note = Any amino acid
  VARIANT 36: note = Any amino acid
  VARIANT 37: note = Any amino acid
  VARIANT 38: note = Any amino acid
  VARIANT 41: note = Any amino acid
  VARIANT 42: note = Any amino acid
  VARIANT 43: note = Any amino acid
  VARIANT 44: note = Any amino acid
  VARIANT 45: note = Any amino acid
  VARIANT 46: note = Any amino acid
  VARIANT 47: note = Any amino acid
  VARIANT 48: note = Any amino acid
  VARIANT 49: note = Any amino acid
  VARIANT 50: note = Any amino acid
  VARIANT 51: note = Any amino acid
  VARIANT 52: note = Any amino acid
GXXXXXXXXXXXXXXXXXXXXXXXXXXXXXGXXXXXXXSAXXXXXXXXXXXXQ

SEQ ID NO: 798095 - protein, 51 aa, unidentified
  VARIANT 2: note = Any amino acid
  VARIANT 3: note = Any amino acid
  VARIANT 4: note = Any amino acid
  VARIANT 5: note = Any amino acid
  VARIANT 6: note = Any amino acid
  VARIANT 7: note = Any amino acid
  VARIANT 8: note = Any amino acid
  VARIANT 9: note = Any amino acid
  VARIANT 10: note = Any amino acid
  VARIANT 11: note = Any amino acid
  VARIANT 12: note = Any amino acid
  VARIANT 13: note = Any amino acid
  VARIANT 14: note = Any amino acid
  VARIANT 15: note = Any amino acid
  VARIANT 16: note = Any amino acid
  VARIANT 17: note = Any amino acid
  VARIANT 18: note = Any amino acid
  VARIANT 19: note = Any amino acid
  VARIANT 20: note = Any amino acid
  VARIANT 21: note = Any amino acid
  VARIANT 22: note = Any amino acid
  VARIANT 23: note = Any amino acid
  VARIANT 24: note = Any amino acid
  VARIANT 25: note = Any amino acid
  VARIANT 26: note = Any amino acid
  VARIANT 27: note = Any amino acid
  VARIANT 28: note = Any amino acid
  VARIANT 29: note = Any amino acid
  VARIANT 30: note = Any amino acid
  VARIANT 32: note = Any amino acid
  VARIANT 33: note = Any amino acid
  VARIANT 34: note = Any amino acid
  VARIANT 35: note = Any amino acid
  VARIANT 36: note = Any amino acid
  VARIANT 37: note = Any amino acid
  VARIANT 38: note = Any amino acid
  VARIANT 41: note = Any amino acid
  VARIANT 42: note = Any amino acid
  VARIANT 43: note = Any amino acid
  VARIANT 44: note = Any amino acid
  VARIANT 45: note = Any amino acid
  VARIANT 46: note = Any amino acid
  VARIANT 47: note = Any amino acid
  VARIANT 48: note = Any amino acid
  VARIANT 49: note = Any amino acid
  VARIANT 50: note = Any amino acid
GXXXXXXXXXXXXXXXXXXXXXXXXXXXXXGXXXXXXXSGXXXXXXXXXXH

SEQ ID NO: 798096 - protein, 53 aa, unidentified
  VARIANT 2: note = Any amino acid
  VARIANT 3: note = Any amino acid
  VARIANT 4: note = Any amino acid
  VARIANT 5: note = Any amino acid
  VARIANT 6: note = Any amino acid
  VARIANT 7: note = Any amino acid
  VARIANT 8: note = Any amino acid
  VARIANT 9: note = Any amino acid
  VARIANT 10: note = Any amino acid
  VARIANT 11: note = Any amino acid
  VARIANT 12: note = Any amino acid
  VARIANT 13: note = Any amino acid
  VARIANT 14: note = Any amino acid
  VARIANT 15: note = Any amino acid
  VARIANT 16: note = Any amino acid
  VARIANT 17: note = Any amino acid
  VARIANT 18: note = Any amino acid
  VARIANT 19: note = Any amino acid
  VARIANT 20: note = Any amino acid
  VARIANT 21: note = Any amino acid
  VARIANT 22: note = Any amino acid
  VARIANT 23: note = Any amino acid
  VARIANT 24: note = Any amino acid
  VARIANT 25: note = Any amino acid
  VARIANT 26: note = Any amino acid
  VARIANT 27: note = Any amino acid
  VARIANT 28: note = Any amino acid
  VARIANT 29: note = Any amino acid
  VARIANT 30: note = Any amino acid
  VARIANT 32: note = Any amino acid
  VARIANT 33: note = Any amino acid
  VARIANT 34: note = Any amino acid
  VARIANT 35: note = Any amino acid
  VARIANT 36: note = Any amino acid
  VARIANT 37: note = Any amino acid
  VARIANT 38: note = Any amino acid
  VARIANT 41: note = Any amino acid
  VARIANT 42: note = Any amino acid
  VARIANT 43: note = Any amino acid
  VARIANT 44: note = Any amino acid
  VARIANT 45: note = Any amino acid
  VARIANT 46: note = Any amino acid
  VARIANT 47: note = Any amino acid
  VARIANT 48: note = Any amino acid
  VARIANT 49: note = Any amino acid
  VARIANT 50: note = Any amino acid
  VARIANT 51: note = Any amino acid
  VARIANT 52: note = Any amino acid
GXXXXXXXXXXXXXXXXXXXXXXXXXXXXXRXXXXXXXSAXXXXXXXXXXXXG

SEQ ID NO: 798097 - protein, 52 aa, unidentified
  VARIANT 2: note = Any amino acid
  VARIANT 3: note = Any amino acid
  VARIANT 4: note = Any amino acid
  VARIANT 5: note = Any amino acid
  VARIANT 6: note = Any amino acid
  VARIANT 7: note = Any amino acid
  VARIANT 8: note = Any amino acid
  VARIANT 9: note = Any amino acid
  VARIANT 10: note = Any amino acid
  VARIANT 11: note = Any amino acid
  VARIANT 12: note = Any amino acid
  VARIANT 13: note = Any amino acid
  VARIANT 14: note = Any amino acid
  VARIANT 15: note = Any amino acid
  VARIANT 16: note = Any amino acid
  VARIANT 17: note = Any amino acid
  VARIANT 18: note = Any amino acid
  VARIANT 19: note = Any amino acid
  VARIANT 20: note = Any amino acid
  VARIANT 21: note = Any amino acid
  VARIANT 22: note = Any amino acid
  VARIANT 23: note = Any amino acid
  VARIANT 24: note = Any amino acid
  VARIANT 25: note = Any amino acid
  VARIANT 26: note = Any amino acid
  VARIANT 27: note = Any amino acid
  VARIANT 28: note = Any amino acid
  VARIANT 29: note = Any amino acid
  VARIANT 30: note = Any amino acid
  VARIANT 32: note = Any amino acid
  VARIANT 33: note = Any amino acid
  VARIANT 34: note = Any amino acid
  VARIANT 35: note = Any amino acid
  VARIANT 36: note = Any amino acid
  VARIANT 37: note = Any amino acid
  VARIANT 38: note = Any amino acid
  VARIANT 41: note = Any amino acid
  VARIANT 42: note = Any amino acid
  VARIANT 43: note = Any amino acid
  VARIANT 44: note = Any amino acid
  VARIANT 45: note = Any amino acid
  VARIANT 46: note = Any amino acid
  VARIANT 47: note = Any amino acid
  VARIANT 48: note = Any amino acid
  VARIANT 49: note = Any amino acid
  VARIANT 50: note = Any amino acid
  VARIANT 51: note = Any amino acid
GXXXXXXXXXXXXXXXXXXXXXXXXXXXXXRXXXXXXXSHXXXXXXXXXXXG

SEQ ID NO: 798098 - protein, 51 aa, unidentified
  VARIANT 2: note = Any amino acid
  VARIANT 3: note = Any amino acid
  VARIANT 4: note = Any amino acid
  VARIANT 5: note = Any amino acid
  VARIANT 6: note = Any amino acid
  VARIANT 7: note = Any amino acid
  VARIANT 8: note = Any amino acid
  VARIANT 9: note = Any amino acid
  VARIANT 10: note = Any amino acid
  VARIANT 11: note = Any amino acid
  VARIANT 12: note = Any amino acid
  VARIANT 13: note = Any amino acid
  VARIANT 14: note = Any amino acid
  VARIANT 15: note = Any amino acid
  VARIANT 16: note = Any amino acid
  VARIANT 17: note = Any amino acid
  VARIANT 18: note = Any amino acid
  VARIANT 19: note = Any amino acid
  VARIANT 20: note = Any amino acid
  VARIANT 21: note = Any amino acid
  VARIANT 22: note = Any amino acid
  VARIANT 23: note = Any amino acid
  VARIANT 24: note = Any amino acid
  VARIANT 25: note = Any amino acid
  VARIANT 26: note = Any amino acid
  VARIANT 27: note = Any amino acid
  VARIANT 28: note = Any amino acid
  VARIANT 29: note = Any amino acid
  VARIANT 30: note = Any amino acid
  VARIANT 32: note = Any amino acid
  VARIANT 33: note = Any amino acid
  VARIANT 34: note = Any amino acid
  VARIANT 35: note = Any amino acid
  VARIANT 36: note = Any amino acid
  VARIANT 37: note = Any amino acid
  VARIANT 38: note = Any amino acid
  VARIANT 41: note = Any amino acid
  VARIANT 42: note = Any amino acid
  VARIANT 43: note = Any amino acid
  VARIANT 44: note = Any amino acid
  VARIANT 45: note = Any amino acid
  VARIANT 46: note = Any amino acid
  VARIANT 47: note = Any amino acid
  VARIANT 48: note = Any amino acid
  VARIANT 49: note = Any amino acid
  VARIANT 50: note = Any amino acid
GXXXXXXXXXXXXXXXXXXXXXXXXXXXXXRXXXXXXXSNXXXXXXXXXXG

SEQ ID NO: 798099 - protein, 52 aa, unidentified
  VARIANT 2: note = Any amino acid
  VARIANT 3: note = Any amino acid
  VARIANT 4: note = Any amino acid
  VARIANT 5: note = Any amino acid
  VARIANT 6: note = Any amino acid
  VARIANT 7: note = Any amino acid
  VARIANT 8: note = Any amino acid
  VARIANT 9: note = Any amino acid
  VARIANT 10: note = Any amino acid
  VARIANT 11: note = Any amino acid
  VARIANT 12: note = Any amino acid
  VARIANT 13: note = Any amino acid
  VARIANT 14: note = Any amino acid
  VARIANT 15: note = Any amino acid
  VARIANT 16: note = Any amino acid
  VARIANT 17: note = Any amino acid
  VARIANT 18: note = Any amino acid
  VARIANT 19: note = Any amino acid
  VARIANT 20: note = Any amino acid
  VARIANT 21: note = Any amino acid
  VARIANT 22: note = Any amino acid
  VARIANT 23: note = Any amino acid
  VARIANT 24: note = Any amino acid
  VARIANT 25: note = Any amino acid
  VARIANT 26: note = Any amino acid
  VARIANT 27: note = Any amino acid
  VARIANT 28: note = Any amino acid
  VARIANT 29: note = Any amino acid
  VARIANT 30: note = Any amino acid
  VARIANT 32: note = Any amino acid
  VARIANT 33: note = Any amino acid
  VARIANT 34: note = Any amino acid
  VARIANT 35: note = Any amino acid
  VARIANT 36: note = Any amino acid
  VARIANT 37: note = Any amino acid
  VARIANT 38: note = Any amino acid
  VARIANT 41: note = Any amino acid
  VARIANT 42: note = Any amino acid
  VARIANT 43: note = Any amino acid
  VARIANT 44: note = Any amino acid
  VARIANT 45: note = Any amino acid
  VARIANT 46: note = Any amino acid
  VARIANT 47: note = Any amino acid
  VARIANT 48: note = Any amino acid
  VARIANT 49: note = Any amino acid
  VARIANT 50: note = Any amino acid
  VARIANT 51: note = Any amino acid
QXXXXXXXXXXXXXXXXXXXXXXXXXXXXXGXXXXXXXTGXXXXXXXXXXXG

SEQ ID NO: 798100 - protein, 53 aa, unidentified
  VARIANT 2: note = Any amino acid
  VARIANT 3: note = Any amino acid
  VARIANT 4: note = Any amino acid
  VARIANT 5: note = Any amino acid
  VARIANT 6: note = Any amino acid
  VARIANT 7: note = Any amino acid
  VARIANT 8: note = Any amino acid
  VARIANT 9: note = Any amino acid
  VARIANT 10: note = Any amino acid
  VARIANT 11: note = Any amino acid
  VARIANT 12: note = Any amino acid
  VARIANT 13: note = Any amino acid
  VARIANT 14: note = Any amino acid
  VARIANT 15: note = Any amino acid
  VARIANT 16: note = Any amino acid
  VARIANT 17: note = Any amino acid
  VARIANT 18: note = Any amino acid
  VARIANT 19: note = Any amino acid
  VARIANT 20: note = Any amino acid
  VARIANT 21: note = Any amino acid
  VARIANT 22: note = Any amino acid
  VARIANT 23: note = Any amino acid
  VARIANT 24: note = Any amino acid
  VARIANT 25: note = Any amino acid
  VARIANT 26: note = Any amino acid
  VARIANT 27: note = Any amino acid
  VARIANT 28: note = Any amino acid
  VARIANT 29: note = Any amino acid
  VARIANT 30: note = Any amino acid
  VARIANT 32: note = Any amino acid
  VARIANT 33: note = Any amino acid
  VARIANT 34: note = Any amino acid
  VARIANT 35: note = Any amino acid
  VARIANT 36: note = Any amino acid
  VARIANT 37: note = Any amino acid
  VARIANT 38: note = Any amino acid
  VARIANT 41: note = Any amino acid
  VARIANT 42: note = Any amino acid
  VARIANT 43: note = Any amino acid
  VARIANT 44: note = Any amino acid
  VARIANT 45: note = Any amino acid
  VARIANT 46: note = Any amino acid
  VARIANT 47: note = Any amino acid
  VARIANT 48: note = Any amino acid
  VARIANT 49: note = Any amino acid
  VARIANT 50: note = Any amino acid
  VARIANT 51: note = Any amino acid
  VARIANT 52: note = Any amino acid
FXXXXXXXXXXXXXXXXXXXXXXXXXXXXXGXXXXXXXSSXXXXXXXXXXXXR

SEQ ID NO: 798101 - protein, 53 aa, unidentified
  VARIANT 2: note = Any amino acid
  VARIANT 3: note = Any amino acid
  VARIANT 4: note = Any amino acid
  VARIANT 5: note = Any amino acid
  VARIANT 6: note = Any amino acid
  VARIANT 7: note = Any amino acid
  VARIANT 8: note = Any amino acid
  VARIANT 9: note = Any amino acid
  VARIANT 10: note = Any amino acid
  VARIANT 11: note = Any amino acid
  VARIANT 12: note = Any amino acid
  VARIANT 13: note = Any amino acid
  VARIANT 14: note = Any amino acid
  VARIANT 15: note = Any amino acid
  VARIANT 16: note = Any amino acid
  VARIANT 17: note = Any amino acid
  VARIANT 18: note = Any amino acid
  VARIANT 19: note = Any amino acid
  VARIANT 20: note = Any amino acid
  VARIANT 21: note = Any amino acid
  VARIANT 22: note = Any amino acid
  VARIANT 23: note = Any amino acid
  VARIANT 24: note = Any amino acid
  VARIANT 25: note = Any amino acid
  VARIANT 26: note = Any amino acid
  VARIANT 27: note = Any amino acid
  VARIANT 28: note = Any amino acid
  VARIANT 29: note = Any amino acid
  VARIANT 30: note = Any amino acid
  VARIANT 32: note = Any amino acid
  VARIANT 33: note = Any amino acid
  VARIANT 34: note = Any amino acid
  VARIANT 35: note = Any amino acid
  VARIANT 36: note = Any amino acid
  VARIANT 37: note = Any amino acid
  VARIANT 38: note = Any amino acid
  VARIANT 41: note = Any amino acid
  VARIANT 42: note = Any amino acid
  VARIANT 43: note = Any amino acid
  VARIANT 44: note = Any amino acid
  VARIANT 45: note = Any amino acid
  VARIANT 46: note = Any amino acid
  VARIANT 47: note = Any amino acid
  VARIANT 48: note = Any amino acid
  VARIANT 49: note = Any amino acid
  VARIANT 50: note = Any amino acid
  VARIANT 51: note = Any amino acid
  VARIANT 52: note = Any amino acid
FXXXXXXXXXXXXXXXXXXXXXXXXXXXXXGXXXXXXXTAXXXXXXXXXXXXR

SEQ ID NO: 798102 - protein, 52 aa, unidentified
  VARIANT 2: note = Any amino acid
  VARIANT 3: note = Any amino acid
  VARIANT 4: note = Any amino acid
  VARIANT 5: note = Any amino acid
  VARIANT 6: note = Any amino acid
  VARIANT 7: note = Any amino acid
  VARIANT 8: note = Any amino acid
  VARIANT 9: note = Any amino acid
  VARIANT 10: note = Any amino acid
  VARIANT 11: note = Any amino acid
  VARIANT 12: note = Any amino acid
  VARIANT 13: note = Any amino acid
  VARIANT 14: note = Any amino acid
  VARIANT 15: note = Any amino acid
  VARIANT 16: note = Any amino acid
  VARIANT 17: note = Any amino acid
  VARIANT 18: note = Any amino acid
  VARIANT 19: note = Any amino acid
  VARIANT 20: note = Any amino acid
  VARIANT 21: note = Any amino acid
  VARIANT 22: note = Any amino acid
  VARIANT 23: note = Any amino acid
  VARIANT 24: note = Any amino acid
  VARIANT 25: note = Any amino acid
  VARIANT 26: note = Any amino acid
  VARIANT 27: note = Any amino acid
  VARIANT 28: note = Any amino acid
  VARIANT 29: note = Any amino acid
  VARIANT 30: note = Any amino acid
  VARIANT 32: note = Any amino acid
  VARIANT 33: note = Any amino acid
  VARIANT 34: note = Any amino acid
  VARIANT 35: note = Any amino acid
  VARIANT 36: note = Any amino acid
  VARIANT 37: note = Any amino acid
  VARIANT 38: note = Any amino acid
  VARIANT 41: note = Any amino acid
  VARIANT 42: note = Any amino acid
  VARIANT 43: note = Any amino acid
  VARIANT 44: note = Any amino acid
  VARIANT 45: note = Any amino acid
  VARIANT 46: note = Any amino acid
  VARIANT 47: note = Any amino acid
  VARIANT 48: note = Any amino acid
  VARIANT 49: note = Any amino acid
  VARIANT 50: note = Any amino acid
  VARIANT 51: note = Any amino acid
GXXXXXXXXXXXXXXXXXXXXXXXXXXXXXRXXXXXXXSNXXXXXXXXXXXS

SEQ ID NO: 798103 - protein, 54 aa, unidentified
  VARIANT 2: note = Any amino acid
  VARIANT 3: note = Any amino acid
  VARIANT 4: note = Any amino acid
  VARIANT 5: note = Any amino acid
  VARIANT 6: note = Any amino acid
  VARIANT 7: note = Any amino acid
  VARIANT 8: note = Any amino acid
  VARIANT 9: note = Any amino acid
  VARIANT 10: note = Any amino acid
  VARIANT 11: note = Any amino acid
  VARIANT 12: note = Any amino acid
  VARIANT 13: note = Any amino acid
  VARIANT 14: note = Any amino acid
  VARIANT 15: note = Any amino acid
  VARIANT 16: note = Any amino acid
  VARIANT 17: note = Any amino acid
  VARIANT 18: note = Any amino acid
  VARIANT 19: note = Any amino acid
  VARIANT 20: note = Any amino acid
  VARIANT 21: note = Any amino acid
  VARIANT 22: note = Any amino acid
  VARIANT 23: note = Any amino acid
  VARIANT 24: note = Any amino acid
  VARIANT 25: note = Any amino acid
  VARIANT 26: note = Any amino acid
  VARIANT 27: note = Any amino acid
  VARIANT 28: note = Any amino acid
  VARIANT 29: note = Any amino acid
  VARIANT 30: note = Any amino acid
  VARIANT 31: note = Any amino acid
  VARIANT 32: note = Any amino acid
  VARIANT 34: note = Any amino acid
  VARIANT 35: note = Any amino acid
  VARIANT 36: note = Any amino acid
  VARIANT 37: note = Any amino acid
  VARIANT 38: note = Any amino acid
  VARIANT 39: note = Any amino acid
  VARIANT 40: note = Any amino acid
  VARIANT 43: note = Any amino acid
  VARIANT 44: note = Any amino acid
  VARIANT 45: note = Any amino acid
  VARIANT 46: note = Any amino acid
  VARIANT 47: note = Any amino acid
  VARIANT 48: note = Any amino acid
  VARIANT 49: note = Any amino acid
  VARIANT 50: note = Any amino acid
  VARIANT 51: note = Any amino acid
  VARIANT 52: note = Any amino acid
  VARIANT 53: note = Any amino acid
GXXXXXXXXXXXXXXXXXXXXXXXXXXXXXXXGXXXXXXXTGXXXXXXXXXXXG

SEQ ID NO: 798104 - protein, 53 aa, unidentified
  VARIANT 2: note = Any amino acid
  VARIANT 3: note = Any amino acid
  VARIANT 4: note = Any amino acid
  VARIANT 5: note = Any amino acid
  VARIANT 6: note = Any amino acid
  VARIANT 7: note = Any amino acid
  VARIANT 8: note = Any amino acid
  VARIANT 9: note = Any amino acid
  VARIANT 10: note = Any amino acid
  VARIANT 11: note = Any amino acid
  VARIANT 12: note = Any amino acid
  VARIANT 13: note = Any amino acid
  VARIANT 14: note = Any amino acid
  VARIANT 15: note = Any amino acid
  VARIANT 16: note = Any amino acid
  VARIANT 17: note = Any amino acid
  VARIANT 18: note = Any amino acid
  VARIANT 19: note = Any amino acid
  VARIANT 20: note = Any amino acid
  VARIANT 21: note = Any amino acid
  VARIANT 22: note = Any amino acid
  VARIANT 23: note = Any amino acid
  VARIANT 24: note = Any amino acid
  VARIANT 25: note = Any amino acid
  VARIANT 26: note = Any amino acid
  VARIANT 27: note = Any amino acid
  VARIANT 28: note = Any amino acid
  VARIANT 29: note = Any amino acid
  VARIANT 30: note = Any amino acid
  VARIANT 32: note = Any amino acid
  VARIANT 33: note = Any amino acid
  VARIANT 34: note = Any amino acid
  VARIANT 35: note = Any amino acid
  VARIANT 36: note = Any amino acid
  VARIANT 37: note = Any amino acid
  VARIANT 38: note = Any amino acid
  VARIANT 41: note = Any amino acid
  VARIANT 42: note = Any amino acid
  VARIANT 43: note = Any amino acid
  VARIANT 44: note = Any amino acid
  VARIANT 45: note = Any amino acid
  VARIANT 46: note = Any amino acid
  VARIANT 47: note = Any amino acid
  VARIANT 48: note = Any amino acid
  VARIANT 49: note = Any amino acid
  VARIANT 50: note = Any amino acid
  VARIANT 51: note = Any amino acid
  VARIANT 52: note = Any amino acid
QXXXXXXXXXXXXXXXXXXXXXXXXXXXXXGXXXXXXXSSXXXXXXXXXXXXR

SEQ ID NO: 798105 - protein, 51 aa, unidentified
  VARIANT 2: note = Any amino acid
  VARIANT 3: note = Any amino acid
  VARIANT 4: note = Any amino acid
  VARIANT 5: note = Any amino acid
  VARIANT 6: note = Any amino acid
  VARIANT 7: note = Any amino acid
  VARIANT 8: note = Any amino acid
  VARIANT 9: note = Any amino acid
  VARIANT 10: note = Any amino acid
  VARIANT 11: note = Any amino acid
  VARIANT 12: note = Any amino acid
  VARIANT 13: note = Any amino acid
  VARIANT 14: note = Any amino acid
  VARIANT 15: note = Any amino acid
  VARIANT 16: note = Any amino acid
  VARIANT 17: note = Any amino acid
  VARIANT 18: note = Any amino acid
  VARIANT 19: note = Any amino acid
  VARIANT 20: note = Any amino acid
  VARIANT 21: note = Any amino acid
  VARIANT 22: note = Any amino acid
  VARIANT 23: note = Any amino acid
  VARIANT 24: note = Any amino acid
  VARIANT 25: note = Any amino acid
  VARIANT 26: note = Any amino acid
  VARIANT 27: note = Any amino acid
  VARIANT 28: note = Any amino acid
  VARIANT 29: note = Any amino acid
  VARIANT 31: note = Any amino acid
  VARIANT 32: note = Any amino acid
  VARIANT 33: note = Any amino acid
  VARIANT 34: note = Any amino acid
  VARIANT 35: note = Any amino acid
  VARIANT 36: note = Any amino acid
  VARIANT 37: note = Any amino acid
  VARIANT 40: note = Any amino acid
  VARIANT 41: note = Any amino acid
  VARIANT 42: note = Any amino acid
  VARIANT 43: note = Any amino acid
  VARIANT 44: note = Any amino acid
  VARIANT 45: note = Any amino acid
  VARIANT 46: note = Any amino acid
  VARIANT 47: note = Any amino acid
  VARIANT 48: note = Any amino acid
  VARIANT 49: note = Any amino acid
  VARIANT 50: note = Any amino acid
GXXXXXXXXXXXXXXXXXXXXXXXXXXXXGXXXXXXXTAXXXXXXXXXXXG

SEQ ID NO: 798106 - protein, 52 aa, unidentified
  VARIANT 2: note = Any amino acid
  VARIANT 3: note = Any amino acid
  VARIANT 4: note = Any amino acid
  VARIANT 5: note = Any amino acid
  VARIANT 6: note = Any amino acid
  VARIANT 7: note = Any amino acid
  VARIANT 8: note = Any amino acid
  VARIANT 9: note = Any amino acid
  VARIANT 10: note = Any amino acid
  VARIANT 11: note = Any amino acid
  VARIANT 12: note = Any amino acid
  VARIANT 13: note = Any amino acid
  VARIANT 14: note = Any amino acid
  VARIANT 15: note = Any amino acid
  VARIANT 16: note = Any amino acid
  VARIANT 17: note = Any amino acid
  VARIANT 18: note = Any amino acid
  VARIANT 19: note = Any amino acid
  VARIANT 20: note = Any amino acid
  VARIANT 21: note = Any amino acid
  VARIANT 22: note = Any amino acid
  VARIANT 23: note = Any amino acid
  VARIANT 24: note = Any amino acid
  VARIANT 25: note = Any amino acid
  VARIANT 26: note = Any amino acid
  VARIANT 27: note = Any amino acid
  VARIANT 28: note = Any amino acid
  VARIANT 29: note = Any amino acid
  VARIANT 30: note = Any amino acid
  VARIANT 32: note = Any amino acid
  VARIANT 33: note = Any amino acid
  VARIANT 34: note = Any amino acid
  VARIANT 35: note = Any amino acid
  VARIANT 36: note = Any amino acid
  VARIANT 37: note = Any amino acid
  VARIANT 38: note = Any amino acid
  VARIANT 41: note = Any amino acid
  VARIANT 42: note = Any amino acid
  VARIANT 43: note = Any amino acid
  VARIANT 44: note = Any amino acid
  VARIANT 45: note = Any amino acid
  VARIANT 46: note = Any amino acid
  VARIANT 47: note = Any amino acid
  VARIANT 48: note = Any amino acid
  VARIANT 49: note = Any amino acid
  VARIANT 50: note = Any amino acid
  VARIANT 51: note = Any amino acid
GXXXXXXXXXXXXXXXXXXXXXXXXXXXXXGXXXXXXXSDXXXXXXXXXXXH

SEQ ID NO: 798107 - protein, 52 aa, unidentified
  VARIANT 2: note = Any amino acid
  VARIANT 3: note = Any amino acid
  VARIANT 4: note = Any amino acid
  VARIANT 5: note = Any amino acid
  VARIANT 6: note = Any amino acid
  VARIANT 7: note = Any amino acid
  VARIANT 8: note = Any amino acid
  VARIANT 9: note = Any amino acid
  VARIANT 10: note = Any amino acid
  VARIANT 11: note = Any amino acid
  VARIANT 12: note = Any amino acid
  VARIANT 13: note = Any amino acid
  VARIANT 14: note = Any amino acid
  VARIANT 15: note = Any amino acid
  VARIANT 16: note = Any amino acid
  VARIANT 17: note = Any amino acid
  VARIANT 18: note = Any amino acid
  VARIANT 19: note = Any amino acid
  VARIANT 20: note = Any amino acid
  VARIANT 21: note = Any amino acid
  VARIANT 22: note = Any amino acid
  VARIANT 23: note = Any amino acid
  VARIANT 24: note = Any amino acid
  VARIANT 25: note = Any amino acid
  VARIANT 26: note = Any amino acid
  VARIANT 27: note = Any amino acid
  VARIANT 28: note = Any amino acid
  VARIANT 29: note = Any amino acid
  VARIANT 30: note = Any amino acid
  VARIANT 32: note = Any amino acid
  VARIANT 33: note = Any amino acid
  VARIANT 34: note = Any amino acid
  VARIANT 35: note = Any amino acid
  VARIANT 36: note = Any amino acid
  VARIANT 37: note = Any amino acid
  VARIANT 38: note = Any amino acid
  VARIANT 41: note = Any amino acid
  VARIANT 42: note = Any amino acid
  VARIANT 43: note = Any amino acid
  VARIANT 44: note = Any amino acid
  VARIANT 45: note = Any amino acid
  VARIANT 46: note = Any amino acid
  VARIANT 47: note = Any amino acid
  VARIANT 48: note = Any amino acid
  VARIANT 49: note = Any amino acid
  VARIANT 50: note = Any amino acid
  VARIANT 51: note = Any amino acid
GXXXXXXXXXXXXXXXXXXXXXXXXXXXXXGXXXXXXXSDXXXXXXXXXXXQ

SEQ ID NO: 798108 - protein, 52 aa, unidentified
  VARIANT 2: note = Any amino acid
  VARIANT 3: note = Any amino acid
  VARIANT 4: note = Any amino acid
  VARIANT 5: note = Any amino acid
  VARIANT 6: note = Any amino acid
  VARIANT 7: note = Any amino acid
  VARIANT 8: note = Any amino acid
  VARIANT 9: note = Any amino acid
  VARIANT 10: note = Any amino acid
  VARIANT 11: note = Any amino acid
  VARIANT 12: note = Any amino acid
  VARIANT 13: note = Any amino acid
  VARIANT 14: note = Any amino acid
  VARIANT 15: note = Any amino acid
  VARIANT 16: note = Any amino acid
  VARIANT 17: note = Any amino acid
  VARIANT 18: note = Any amino acid
  VARIANT 19: note = Any amino acid
  VARIANT 20: note = Any amino acid
  VARIANT 21: note = Any amino acid
  VARIANT 22: note = Any amino acid
  VARIANT 23: note = Any amino acid
  VARIANT 24: note = Any amino acid
  VARIANT 25: note = Any amino acid
  VARIANT 26: note = Any amino acid
  VARIANT 27: note = Any amino acid
  VARIANT 28: note = Any amino acid
  VARIANT 29: note = Any amino acid
  VARIANT 30: note = Any amino acid
  VARIANT 32: note = Any amino acid
  VARIANT 33: note = Any amino acid
  VARIANT 34: note = Any amino acid
  VARIANT 35: note = Any amino acid
  VARIANT 36: note = Any amino acid
  VARIANT 37: note = Any amino acid
  VARIANT 38: note = Any amino acid
  VARIANT 41: note = Any amino acid
  VARIANT 42: note = Any amino acid
  VARIANT 43: note = Any amino acid
  VARIANT 44: note = Any amino acid
  VARIANT 45: note = Any amino acid
  VARIANT 46: note = Any amino acid
  VARIANT 47: note = Any amino acid
  VARIANT 48: note = Any amino acid
  VARIANT 49: note = Any amino acid
  VARIANT 50: note = Any amino acid
  VARIANT 51: note = Any amino acid
GXXXXXXXXXXXXXXXXXXXXXXXXXXXXXGXXXXXXXSGXXXXXXXXXXXE

SEQ ID NO: 798109 - protein, 53 aa, unidentified
  VARIANT 2: note = Any amino acid
  VARIANT 3: note = Any amino acid
  VARIANT 4: note = Any amino acid
  VARIANT 5: note = Any amino acid
  VARIANT 6: note = Any amino acid
  VARIANT 7: note = Any amino acid
  VARIANT 8: note = Any amino acid
  VARIANT 9: note = Any amino acid
  VARIANT 10: note = Any amino acid
  VARIANT 11: note = Any amino acid
  VARIANT 12: note = Any amino acid
  VARIANT 13: note = Any amino acid
  VARIANT 14: note = Any amino acid
  VARIANT 15: note = Any amino acid
  VARIANT 16: note = Any amino acid
  VARIANT 17: note = Any amino acid
  VARIANT 18: note = Any amino acid
  VARIANT 19: note = Any amino acid
  VARIANT 20: note = Any amino acid
  VARIANT 21: note = Any amino acid
  VARIANT 22: note = Any amino acid
  VARIANT 23: note = Any amino acid
  VARIANT 24: note = Any amino acid
  VARIANT 25: note = Any amino acid
  VARIANT 26: note = Any amino acid
  VARIANT 27: note = Any amino acid
  VARIANT 28: note = Any amino acid
  VARIANT 29: note = Any amino acid
  VARIANT 30: note = Any amino acid
  VARIANT 32: note = Any amino acid
  VARIANT 33: note = Any amino acid
  VARIANT 34: note = Any amino acid
  VARIANT 35: note = Any amino acid
  VARIANT 36: note = Any amino acid
  VARIANT 37: note = Any amino acid
  VARIANT 38: note = Any amino acid
  VARIANT 41: note = Any amino acid
  VARIANT 42: note = Any amino acid
  VARIANT 43: note = Any amino acid
  VARIANT 44: note = Any amino acid
  VARIANT 45: note = Any amino acid
  VARIANT 46: note = Any amino acid
  VARIANT 47: note = Any amino acid
  VARIANT 48: note = Any amino acid
  VARIANT 49: note = Any amino acid
  VARIANT 50: note = Any amino acid
  VARIANT 51: note = Any amino acid
  VARIANT 52: note = Any amino acid
GXXXXXXXXXXXXXXXXXXXXXXXXXXXXXGXXXXXXXSSXXXXXXXXXXXXK

SEQ ID NO: 798110 - protein, 56 aa, unidentified
  VARIANT 2: note = Any amino acid
  VARIANT 3: note = Any amino acid
  VARIANT 4: note = Any amino acid
  VARIANT 5: note = Any amino acid
  VARIANT 6: note = Any amino acid
  VARIANT 7: note = Any amino acid
  VARIANT 8: note = Any amino acid
  VARIANT 9: note = Any amino acid
  VARIANT 10: note = Any amino acid
  VARIANT 11: note = Any amino acid
  VARIANT 12: note = Any amino acid
  VARIANT 13: note = Any amino acid
  VARIANT 14: note = Any amino acid
  VARIANT 15: note = Any amino acid
  VARIANT 16: note = Any amino acid
  VARIANT 17: note = Any amino acid
  VARIANT 18: note = Any amino acid
  VARIANT 19: note = Any amino acid
  VARIANT 20: note = Any amino acid
  VARIANT 21: note = Any amino acid
  VARIANT 22: note = Any amino acid
  VARIANT 23: note = Any amino acid
  VARIANT 24: note = Any amino acid
  VARIANT 25: note = Any amino acid
  VARIANT 26: note = Any amino acid
  VARIANT 27: note = Any amino acid
  VARIANT 28: note = Any amino acid
  VARIANT 29: note = Any amino acid
  VARIANT 30: note = Any amino acid
  VARIANT 32: note = Any amino acid
  VARIANT 33: note = Any amino acid
  VARIANT 34: note = Any amino acid
  VARIANT 35: note = Any amino acid
  VARIANT 36: note = Any amino acid
  VARIANT 37: note = Any amino acid
  VARIANT 38: note = Any amino acid
  VARIANT 41: note = Any amino acid
  VARIANT 42: note = Any amino acid
  VARIANT 43: note = Any amino acid
  VARIANT 44: note = Any amino acid
  VARIANT 45: note = Any amino acid
  VARIANT 46: note = Any amino acid
  VARIANT 47: note = Any amino acid
  VARIANT 48: note = Any amino acid
  VARIANT 49: note = Any amino acid
  VARIANT 50: note = Any amino acid
  VARIANT 51: note = Any amino acid
  VARIANT 52: note = Any amino acid
  VARIANT 53: note = Any amino acid
  VARIANT 54: note = Any amino acid
  VARIANT 55: note = Any amino acid
GXXXXXXXXXXXXXXXXXXXXXXXXXXXXXLXXXXXXXTGXXXXXXXXXXXXXXXG

SEQ ID NO: 798111 - protein, 53 aa, unidentified
  VARIANT 2: note = Any amino acid
  VARIANT 3: note = Any amino acid
  VARIANT 4: note = Any amino acid
  VARIANT 5: note = Any amino acid
  VARIANT 6: note = Any amino acid
  VARIANT 7: note = Any amino acid
  VARIANT 8: note = Any amino acid
  VARIANT 9: note = Any amino acid
  VARIANT 10: note = Any amino acid
  VARIANT 11: note = Any amino acid
  VARIANT 12: note = Any amino acid
  VARIANT 13: note = Any amino acid
  VARIANT 14: note = Any amino acid
  VARIANT 15: note = Any amino acid
  VARIANT 16: note = Any amino acid
  VARIANT 17: note = Any amino acid
  VARIANT 18: note = Any amino acid
  VARIANT 19: note = Any amino acid
  VARIANT 20: note = Any amino acid
  VARIANT 21: note = Any amino acid
  VARIANT 22: note = Any amino acid
  VARIANT 23: note = Any amino acid
  VARIANT 24: note = Any amino acid
  VARIANT 25: note = Any amino acid
  VARIANT 26: note = Any amino acid
  VARIANT 27: note = Any amino acid
  VARIANT 28: note = Any amino acid
  VARIANT 29: note = Any amino acid
  VARIANT 30: note = Any amino acid
  VARIANT 32: note = Any amino acid
  VARIANT 33: note = Any amino acid
  VARIANT 34: note = Any amino acid
  VARIANT 35: note = Any amino acid
  VARIANT 36: note = Any amino acid
  VARIANT 37: note = Any amino acid
  VARIANT 38: note = Any amino acid
  VARIANT 41: note = Any amino acid
  VARIANT 42: note = Any amino acid
  VARIANT 43: note = Any amino acid
  VARIANT 44: note = Any amino acid
  VARIANT 45: note = Any amino acid
  VARIANT 46: note = Any amino acid
  VARIANT 47: note = Any amino acid
  VARIANT 48: note = Any amino acid
  VARIANT 49: note = Any amino acid
  VARIANT 50: note = Any amino acid
  VARIANT 51: note = Any amino acid
  VARIANT 52: note = Any amino acid
GXXXXXXXXXXXXXXXXXXXXXXXXXXXXXQXXXXXXXSDXXXXXXXXXXXXG

SEQ ID NO: 798112 - protein, 53 aa, unidentified
  VARIANT 2: note = Any amino acid
  VARIANT 3: note = Any amino acid
  VARIANT 4: note = Any amino acid
  VARIANT 5: note = Any amino acid
  VARIANT 6: note = Any amino acid
  VARIANT 7: note = Any amino acid
  VARIANT 8: note = Any amino acid
  VARIANT 9: note = Any amino acid
  VARIANT 10: note = Any amino acid
  VARIANT 11: note = Any amino acid
  VARIANT 12: note = Any amino acid
  VARIANT 13: note = Any amino acid
  VARIANT 14: note = Any amino acid
  VARIANT 15: note = Any amino acid
  VARIANT 16: note = Any amino acid
  VARIANT 17: note = Any amino acid
  VARIANT 18: note = Any amino acid
  VARIANT 19: note = Any amino acid
  VARIANT 20: note = Any amino acid
  VARIANT 21: note = Any amino acid
  VARIANT 22: note = Any amino acid
  VARIANT 23: note = Any amino acid
  VARIANT 24: note = Any amino acid
  VARIANT 25: note = Any amino acid
  VARIANT 26: note = Any amino acid
  VARIANT 27: note = Any amino acid
  VARIANT 28: note = Any amino acid
  VARIANT 29: note = Any amino acid
  VARIANT 30: note = Any amino acid
  VARIANT 32: note = Any amino acid
  VARIANT 33: note = Any amino acid
  VARIANT 34: note = Any amino acid
  VARIANT 35: note = Any amino acid
  VARIANT 36: note = Any amino acid
  VARIANT 37: note = Any amino acid
  VARIANT 38: note = Any amino acid
  VARIANT 41: note = Any amino acid
  VARIANT 42: note = Any amino acid
  VARIANT 43: note = Any amino acid
  VARIANT 44: note = Any amino acid
  VARIANT 45: note = Any amino acid
  VARIANT 46: note = Any amino acid
  VARIANT 47: note = Any amino acid
  VARIANT 48: note = Any amino acid
  VARIANT 49: note = Any amino acid
  VARIANT 50: note = Any amino acid
  VARIANT 51: note = Any amino acid
  VARIANT 52: note = Any amino acid
SXXXXXXXXXXXXXXXXXXXXXXXXXXXXXGXXXXXXXSGXXXXXXXXXXXXR

SEQ ID NO: 798113 - protein, 51 aa, unidentified
  VARIANT 2: note = Any amino acid
  VARIANT 3: note = Any amino acid
  VARIANT 4: note = Any amino acid
  VARIANT 5: note = Any amino acid
  VARIANT 6: note = Any amino acid
  VARIANT 7: note = Any amino acid
  VARIANT 8: note = Any amino acid
  VARIANT 9: note = Any amino acid
  VARIANT 10: note = Any amino acid
  VARIANT 11: note = Any amino acid
  VARIANT 12: note = Any amino acid
  VARIANT 13: note = Any amino acid
  VARIANT 14: note = Any amino acid
  VARIANT 15: note = Any amino acid
  VARIANT 16: note = Any amino acid
  VARIANT 17: note = Any amino acid
  VARIANT 18: note = Any amino acid
  VARIANT 19: note = Any amino acid
  VARIANT 20: note = Any amino acid
  VARIANT 21: note = Any amino acid
  VARIANT 22: note = Any amino acid
  VARIANT 23: note = Any amino acid
  VARIANT 24: note = Any amino acid
  VARIANT 25: note = Any amino acid
  VARIANT 26: note = Any amino acid
  VARIANT 27: note = Any amino acid
  VARIANT 28: note = Any amino acid
  VARIANT 29: note = Any amino acid
  VARIANT 30: note = Any amino acid
  VARIANT 32: note = Any amino acid
  VARIANT 33: note = Any amino acid
  VARIANT 34: note = Any amino acid
  VARIANT 35: note = Any amino acid
  VARIANT 36: note = Any amino acid
  VARIANT 37: note = Any amino acid
  VARIANT 38: note = Any amino acid
  VARIANT 41: note = Any amino acid
  VARIANT 42: note = Any amino acid
  VARIANT 43: note = Any amino acid
  VARIANT 44: note = Any amino acid
  VARIANT 45: note = Any amino acid
  VARIANT 46: note = Any amino acid
  VARIANT 47: note = Any amino acid
  VARIANT 48: note = Any amino acid
  VARIANT 49: note = Any amino acid
  VARIANT 50: note = Any amino acid
GXXXXXXXXXXXXXXXXXXXXXXXXXXXXXGXXXXXXXSDXXXXXXXXXXG

SEQ ID NO: 798114 - protein, 52 aa, unidentified
  VARIANT 2: note = Any amino acid
  VARIANT 3: note = Any amino acid
  VARIANT 4: note = Any amino acid
  VARIANT 5: note = Any amino acid
  VARIANT 6: note = Any amino acid
  VARIANT 7: note = Any amino acid
  VARIANT 8: note = Any amino acid
  VARIANT 9: note = Any amino acid
  VARIANT 10: note = Any amino acid
  VARIANT 11: note = Any amino acid
  VARIANT 12: note = Any amino acid
  VARIANT 13: note = Any amino acid
  VARIANT 14: note = Any amino acid
  VARIANT 15: note = Any amino acid
  VARIANT 16: note = Any amino acid
  VARIANT 17: note = Any amino acid
  VARIANT 18: note = Any amino acid
  VARIANT 19: note = Any amino acid
  VARIANT 20: note = Any amino acid
  VARIANT 21: note = Any amino acid
  VARIANT 22: note = Any amino acid
  VARIANT 23: note = Any amino acid
  VARIANT 24: note = Any amino acid
  VARIANT 25: note = Any amino acid
  VARIANT 26: note = Any amino acid
  VARIANT 27: note = Any amino acid
  VARIANT 28: note = Any amino acid
  VARIANT 29: note = Any amino acid
  VARIANT 30: note = Any amino acid
  VARIANT 32: note = Any amino acid
  VARIANT 33: note = Any amino acid
  VARIANT 34: note = Any amino acid
  VARIANT 35: note = Any amino acid
  VARIANT 36: note = Any amino acid
  VARIANT 37: note = Any amino acid
  VARIANT 38: note = Any amino acid
  VARIANT 41: note = Any amino acid
  VARIANT 42: note = Any amino acid
  VARIANT 43: note = Any amino acid
  VARIANT 44: note = Any amino acid
  VARIANT 45: note = Any amino acid
  VARIANT 46: note = Any amino acid
  VARIANT 47: note = Any amino acid
  VARIANT 48: note = Any amino acid
  VARIANT 49: note = Any amino acid
  VARIANT 50: note = Any amino acid
  VARIANT 51: note = Any amino acid
CXXXXXXXXXXXXXXXXXXXXXXXXXXXXXGXXXXXXXSGXXXXXXXXXXXV

SEQ ID NO: 798115 - protein, 52 aa, unidentified
  VARIANT 2: note = Any amino acid
  VARIANT 3: note = Any amino acid
  VARIANT 4: note = Any amino acid
  VARIANT 5: note = Any amino acid
  VARIANT 6: note = Any amino acid
  VARIANT 7: note = Any amino acid
  VARIANT 8: note = Any amino acid
  VARIANT 9: note = Any amino acid
  VARIANT 10: note = Any amino acid
  VARIANT 11: note = Any amino acid
  VARIANT 12: note = Any amino acid
  VARIANT 13: note = Any amino acid
  VARIANT 14: note = Any amino acid
  VARIANT 15: note = Any amino acid
  VARIANT 16: note = Any amino acid
  VARIANT 17: note = Any amino acid
  VARIANT 18: note = Any amino acid
  VARIANT 19: note = Any amino acid
  VARIANT 20: note = Any amino acid
  VARIANT 21: note = Any amino acid
  VARIANT 22: note = Any amino acid
  VARIANT 23: note = Any amino acid
  VARIANT 24: note = Any amino acid
  VARIANT 25: note = Any amino acid
  VARIANT 26: note = Any amino acid
  VARIANT 27: note = Any amino acid
  VARIANT 28: note = Any amino acid
  VARIANT 29: note = Any amino acid
  VARIANT 30: note = Any amino acid
  VARIANT 32: note = Any amino acid
  VARIANT 33: note = Any amino acid
  VARIANT 34: note = Any amino acid
  VARIANT 35: note = Any amino acid
  VARIANT 36: note = Any amino acid
  VARIANT 37: note = Any amino acid
  VARIANT 38: note = Any amino acid
  VARIANT 41: note = Any amino acid
  VARIANT 42: note = Any amino acid
  VARIANT 43: note = Any amino acid
  VARIANT 44: note = Any amino acid
  VARIANT 45: note = Any amino acid
  VARIANT 46: note = Any amino acid
  VARIANT 47: note = Any amino acid
  VARIANT 48: note = Any amino acid
  VARIANT 49: note = Any amino acid
  VARIANT 50: note = Any amino acid
  VARIANT 51: note = Any amino acid
GXXXXXXXXXXXXXXXXXXXXXXXXXXXXXGXXXXXXXSEXXXXXXXXXXXG

SEQ ID NO: 798116 - protein, 58 aa, unidentified
  VARIANT 2: note = Any amino acid
  VARIANT 3: note = Any amino acid
  VARIANT 4: note = Any amino acid
  VARIANT 5: note = Any amino acid
  VARIANT 6: note = Any amino acid
  VARIANT 7: note = Any amino acid
  VARIANT 8: note = Any amino acid
  VARIANT 9: note = Any amino acid
  VARIANT 10: note = Any amino acid
  VARIANT 11: note = Any amino acid
  VARIANT 12: note = Any amino acid
  VARIANT 13: note = Any amino acid
  VARIANT 14: note = Any amino acid
  VARIANT 15: note = Any amino acid
  VARIANT 16: note = Any amino acid
  VARIANT 17: note = Any amino acid
  VARIANT 18: note = Any amino acid
  VARIANT 19: note = Any amino acid
  VARIANT 20: note = Any amino acid
  VARIANT 21: note = Any amino acid
  VARIANT 22: note = Any amino acid
  VARIANT 23: note = Any amino acid
  VARIANT 24: note = Any amino acid
  VARIANT 25: note = Any amino acid
  VARIANT 26: note = Any amino acid
  VARIANT 27: note = Any amino acid
  VARIANT 28: note = Any amino acid
  VARIANT 29: note = Any amino acid
  VARIANT 30: note = Any amino acid
  VARIANT 32: note = Any amino acid
  VARIANT 33: note = Any amino acid
  VARIANT 34: note = Any amino acid
  VARIANT 35: note = Any amino acid
  VARIANT 36: note = Any amino acid
  VARIANT 37: note = Any amino acid
  VARIANT 38: note = Any amino acid
  VARIANT 41: note = Any amino acid
  VARIANT 42: note = Any amino acid
  VARIANT 43: note = Any amino acid
  VARIANT 44: note = Any amino acid
  VARIANT 45: note = Any amino acid
  VARIANT 46: note = Any amino acid
  VARIANT 47: note = Any amino acid
  VARIANT 48: note = Any amino acid
  VARIANT 49: note = Any amino acid
  VARIANT 50: note = Any amino acid
  VARIANT 51: note = Any amino acid
  VARIANT 52: note = Any amino acid
  VARIANT 53: note = Any amino acid
  VARIANT 54: note = Any amino acid
  VARIANT 55: note = Any amino acid
  VARIANT 56: note = Any amino acid
  VARIANT 57: note = Any amino acid
GXXXXXXXXXXXXXXXXXXXXXXXXXXXXXGXXXXXXXSGXXXXXXXXXXXXXXXXXA

SEQ ID NO: 798117 - protein, 53 aa, unidentified
  VARIANT 2: note = Any amino acid
  VARIANT 3: note = Any amino acid
  VARIANT 4: note = Any amino acid
  VARIANT 5: note = Any amino acid
  VARIANT 6: note = Any amino acid
  VARIANT 7: note = Any amino acid
  VARIANT 8: note = Any amino acid
  VARIANT 9: note = Any amino acid
  VARIANT 10: note = Any amino acid
  VARIANT 11: note = Any amino acid
  VARIANT 12: note = Any amino acid
  VARIANT 13: note = Any amino acid
  VARIANT 14: note = Any amino acid
  VARIANT 15: note = Any amino acid
  VARIANT 16: note = Any amino acid
  VARIANT 17: note = Any amino acid
  VARIANT 18: note = Any amino acid
  VARIANT 19: note = Any amino acid
  VARIANT 20: note = Any amino acid
  VARIANT 21: note = Any amino acid
  VARIANT 22: note = Any amino acid
  VARIANT 23: note = Any amino acid
  VARIANT 24: note = Any amino acid
  VARIANT 25: note = Any amino acid
  VARIANT 26: note = Any amino acid
  VARIANT 27: note = Any amino acid
  VARIANT 28: note = Any amino acid
  VARIANT 29: note = Any amino acid
  VARIANT 30: note = Any amino acid
  VARIANT 31: note = Any amino acid
  VARIANT 33: note = Any amino acid
  VARIANT 34: note = Any amino acid
  VARIANT 35: note = Any amino acid
  VARIANT 36: note = Any amino acid
  VARIANT 37: note = Any amino acid
  VARIANT 38: note = Any amino acid
  VARIANT 39: note = Any amino acid
  VARIANT 42: note = Any amino acid
  VARIANT 43: note = Any amino acid
  VARIANT 44: note = Any amino acid
  VARIANT 45: note = Any amino acid
  VARIANT 46: note = Any amino acid
  VARIANT 47: note = Any amino acid
  VARIANT 48: note = Any amino acid
  VARIANT 49: note = Any amino acid
  VARIANT 50: note = Any amino acid
  VARIANT 51: note = Any amino acid
  VARIANT 52: note = Any amino acid
GXXXXXXXXXXXXXXXXXXXXXXXXXXXXXXGXXXXXXXSNXXXXXXXXXXXG

SEQ ID NO: 798118 - protein, 54 aa, unidentified
  VARIANT 2: note = Any amino acid
  VARIANT 3: note = Any amino acid
  VARIANT 4: note = Any amino acid
  VARIANT 5: note = Any amino acid
  VARIANT 6: note = Any amino acid
  VARIANT 7: note = Any amino acid
  VARIANT 8: note = Any amino acid
  VARIANT 9: note = Any amino acid
  VARIANT 10: note = Any amino acid
  VARIANT 11: note = Any amino acid
  VARIANT 12: note = Any amino acid
  VARIANT 13: note = Any amino acid
  VARIANT 14: note = Any amino acid
  VARIANT 15: note = Any amino acid
  VARIANT 16: note = Any amino acid
  VARIANT 17: note = Any amino acid
  VARIANT 18: note = Any amino acid
  VARIANT 19: note = Any amino acid
  VARIANT 20: note = Any amino acid
  VARIANT 21: note = Any amino acid
  VARIANT 22: note = Any amino acid
  VARIANT 23: note = Any amino acid
  VARIANT 24: note = Any amino acid
  VARIANT 25: note = Any amino acid
  VARIANT 26: note = Any amino acid
  VARIANT 27: note = Any amino acid
  VARIANT 28: note = Any amino acid
  VARIANT 29: note = Any amino acid
  VARIANT 30: note = Any amino acid
  VARIANT 31: note = Any amino acid
  VARIANT 32: note = Any amino acid
  VARIANT 34: note = Any amino acid
  VARIANT 35: note = Any amino acid
  VARIANT 36: note = Any amino acid
  VARIANT 37: note = Any amino acid
  VARIANT 38: note = Any amino acid
  VARIANT 39: note = Any amino acid
  VARIANT 40: note = Any amino acid
  VARIANT 43: note = Any amino acid
  VARIANT 44: note = Any amino acid
  VARIANT 45: note = Any amino acid
  VARIANT 46: note = Any amino acid
  VARIANT 47: note = Any amino acid
  VARIANT 48: note = Any amino acid
  VARIANT 49: note = Any amino acid
  VARIANT 50: note = Any amino acid
  VARIANT 51: note = Any amino acid
  VARIANT 52: note = Any amino acid
  VARIANT 53: note = Any amino acid
GXXXXXXXXXXXXXXXXXXXXXXXXXXXXXXXGXXXXXXXSGXXXXXXXXXXXV

SEQ ID NO: 798119 - protein, 52 aa, unidentified
  VARIANT 2: note = Any amino acid
  VARIANT 3: note = Any amino acid
  VARIANT 4: note = Any amino acid
  VARIANT 5: note = Any amino acid
  VARIANT 6: note = Any amino acid
  VARIANT 7: note = Any amino acid
  VARIANT 8: note = Any amino acid
  VARIANT 9: note = Any amino acid
  VARIANT 10: note = Any amino acid
  VARIANT 11: note = Any amino acid
  VARIANT 12: note = Any amino acid
  VARIANT 13: note = Any amino acid
  VARIANT 14: note = Any amino acid
  VARIANT 15: note = Any amino acid
  VARIANT 16: note = Any amino acid
  VARIANT 17: note = Any amino acid
  VARIANT 18: note = Any amino acid
  VARIANT 19: note = Any amino acid
  VARIANT 20: note = Any amino acid
  VARIANT 21: note = Any amino acid
  VARIANT 22: note = Any amino acid
  VARIANT 23: note = Any amino acid
  VARIANT 24: note = Any amino acid
  VARIANT 25: note = Any amino acid
  VARIANT 26: note = Any amino acid
  VARIANT 27: note = Any amino acid
  VARIANT 28: note = Any amino acid
  VARIANT 29: note = Any amino acid
  VARIANT 30: note = Any amino acid
  VARIANT 32: note = Any amino acid
  VARIANT 33: note = Any amino acid
  VARIANT 34: note = Any amino acid
  VARIANT 35: note = Any amino acid
  VARIANT 36: note = Any amino acid
  VARIANT 37: note = Any amino acid
  VARIANT 38: note = Any amino acid
  VARIANT 41: note = Any amino acid
  VARIANT 42: note = Any amino acid
  VARIANT 43: note = Any amino acid
  VARIANT 44: note = Any amino acid
  VARIANT 45: note = Any amino acid
  VARIANT 46: note = Any amino acid
  VARIANT 47: note = Any amino acid
  VARIANT 48: note = Any amino acid
  VARIANT 49: note = Any amino acid
  VARIANT 50: note = Any amino acid
  VARIANT 51: note = Any amino acid
AXXXXXXXXXXXXXXXXXXXXXXXXXXXXXGXXXXXXXSGXXXXXXXXXXXR

SEQ ID NO: 798120 - protein, 52 aa, unidentified
  VARIANT 2: note = Any amino acid
  VARIANT 3: note = Any amino acid
  VARIANT 4: note = Any amino acid
  VARIANT 5: note = Any amino acid
  VARIANT 6: note = Any amino acid
  VARIANT 7: note = Any amino acid
  VARIANT 8: note = Any amino acid
  VARIANT 9: note = Any amino acid
  VARIANT 10: note = Any amino acid
  VARIANT 11: note = Any amino acid
  VARIANT 12: note = Any amino acid
  VARIANT 13: note = Any amino acid
  VARIANT 14: note = Any amino acid
  VARIANT 15: note = Any amino acid
  VARIANT 16: note = Any amino acid
  VARIANT 17: note = Any amino acid
  VARIANT 18: note = Any amino acid
  VARIANT 19: note = Any amino acid
  VARIANT 20: note = Any amino acid
  VARIANT 21: note = Any amino acid
  VARIANT 22: note = Any amino acid
  VARIANT 23: note = Any amino acid
  VARIANT 24: note = Any amino acid
  VARIANT 25: note = Any amino acid
  VARIANT 26: note = Any amino acid
  VARIANT 27: note = Any amino acid
  VARIANT 28: note = Any amino acid
  VARIANT 29: note = Any amino acid
  VARIANT 30: note = Any amino acid
  VARIANT 32: note = Any amino acid
  VARIANT 33: note = Any amino acid
  VARIANT 34: note = Any amino acid
  VARIANT 35: note = Any amino acid
  VARIANT 36: note = Any amino acid
  VARIANT 37: note = Any amino acid
  VARIANT 38: note = Any amino acid
  VARIANT 41: note = Any amino acid
  VARIANT 42: note = Any amino acid
  VARIANT 43: note = Any amino acid
  VARIANT 44: note = Any amino acid
  VARIANT 45: note = Any amino acid
  VARIANT 46: note = Any amino acid
  VARIANT 47: note = Any amino acid
  VARIANT 48: note = Any amino acid
  VARIANT 49: note = Any amino acid
  VARIANT 50: note = Any amino acid
  VARIANT 51: note = Any amino acid
GXXXXXXXXXXXXXXXXXXXXXXXXXXXXXCXXXXXXXSAXXXXXXXXXXXG

SEQ ID NO: 798121 - protein, 57 aa, unidentified
  VARIANT 2: note = Any amino acid
  VARIANT 3: note = Any amino acid
  VARIANT 4: note = Any amino acid
  VARIANT 5: note = Any amino acid
  VARIANT 6: note = Any amino acid
  VARIANT 7: note = Any amino acid
  VARIANT 8: note = Any amino acid
  VARIANT 9: note = Any amino acid
  VARIANT 10: note = Any amino acid
  VARIANT 11: note = Any amino acid
  VARIANT 12: note = Any amino acid
  VARIANT 13: note = Any amino acid
  VARIANT 14: note = Any amino acid
  VARIANT 15: note = Any amino acid
  VARIANT 16: note = Any amino acid
  VARIANT 17: note = Any amino acid
  VARIANT 18: note = Any amino acid
  VARIANT 19: note = Any amino acid
  VARIANT 20: note = Any amino acid
  VARIANT 21: note = Any amino acid
  VARIANT 22: note = Any amino acid
  VARIANT 23: note = Any amino acid
  VARIANT 24: note = Any amino acid
  VARIANT 25: note = Any amino acid
  VARIANT 26: note = Any amino acid
  VARIANT 27: note = Any amino acid
  VARIANT 28: note = Any amino acid
  VARIANT 29: note = Any amino acid
  VARIANT 30: note = Any amino acid
  VARIANT 32: note = Any amino acid
  VARIANT 33: note = Any amino acid
  VARIANT 34: note = Any amino acid
  VARIANT 35: note = Any amino acid
  VARIANT 36: note = Any amino acid
  VARIANT 37: note = Any amino acid
  VARIANT 38: note = Any amino acid
  VARIANT 41: note = Any amino acid
  VARIANT 42: note = Any amino acid
  VARIANT 43: note = Any amino acid
  VARIANT 44: note = Any amino acid
  VARIANT 45: note = Any amino acid
  VARIANT 46: note = Any amino acid
  VARIANT 47: note = Any amino acid
  VARIANT 48: note = Any amino acid
  VARIANT 49: note = Any amino acid
  VARIANT 50: note = Any amino acid
  VARIANT 51: note = Any amino acid
  VARIANT 52: note = Any amino acid
  VARIANT 53: note = Any amino acid
  VARIANT 54: note = Any amino acid
  VARIANT 55: note = Any amino acid
  VARIANT 56: note = Any amino acid
GXXXXXXXXXXXXXXXXXXXXXXXXXXXXXCXXXXXXXTGXXXXXXXXXXXXXXXXG

SEQ ID NO: 798122 - protein, 52 aa, unidentified
  VARIANT 2: note = Any amino acid
  VARIANT 3: note = Any amino acid
  VARIANT 4: note = Any amino acid
  VARIANT 5: note = Any amino acid
  VARIANT 6: note = Any amino acid
  VARIANT 7: note = Any amino acid
  VARIANT 8: note = Any amino acid
  VARIANT 9: note = Any amino acid
  VARIANT 10: note = Any amino acid
  VARIANT 11: note = Any amino acid
  VARIANT 12: note = Any amino acid
  VARIANT 13: note = Any amino acid
  VARIANT 14: note = Any amino acid
  VARIANT 15: note = Any amino acid
  VARIANT 16: note = Any amino acid
  VARIANT 17: note = Any amino acid
  VARIANT 18: note = Any amino acid
  VARIANT 19: note = Any amino acid
  VARIANT 20: note = Any amino acid
  VARIANT 21: note = Any amino acid
  VARIANT 22: note = Any amino acid
  VARIANT 23: note = Any amino acid
  VARIANT 24: note = Any amino acid
  VARIANT 25: note = Any amino acid
  VARIANT 26: note = Any amino acid
  VARIANT 27: note = Any amino acid
  VARIANT 28: note = Any amino acid
  VARIANT 29: note = Any amino acid
  VARIANT 30: note = Any amino acid
  VARIANT 32: note = Any amino acid
  VARIANT 33: note = Any amino acid
  VARIANT 34: note = Any amino acid
  VARIANT 35: note = Any amino acid
  VARIANT 36: note = Any amino acid
  VARIANT 37: note = Any amino acid
  VARIANT 38: note = Any amino acid
  VARIANT 41: note = Any amino acid
  VARIANT 42: note = Any amino acid
  VARIANT 43: note = Any amino acid
  VARIANT 44: note = Any amino acid
  VARIANT 45: note = Any amino acid
  VARIANT 46: note = Any amino acid
  VARIANT 47: note = Any amino acid
  VARIANT 48: note = Any amino acid
  VARIANT 49: note = Any amino acid
  VARIANT 50: note = Any amino acid
  VARIANT 51: note = Any amino acid
GXXXXXXXXXXXXXXXXXXXXXXXXXXXXXGXXXXXXXSDXXXXXXXXXXXS

SEQ ID NO: 798123 - protein, 52 aa, unidentified
  VARIANT 2: note = Any amino acid
  VARIANT 3: note = Any amino acid
  VARIANT 4: note = Any amino acid
  VARIANT 5: note = Any amino acid
  VARIANT 6: note = Any amino acid
  VARIANT 7: note = Any amino acid
  VARIANT 8: note = Any amino acid
  VARIANT 9: note = Any amino acid
  VARIANT 10: note = Any amino acid
  VARIANT 11: note = Any amino acid
  VARIANT 12: note = Any amino acid
  VARIANT 13: note = Any amino acid
  VARIANT 14: note = Any amino acid
  VARIANT 15: note = Any amino acid
  VARIANT 16: note = Any amino acid
  VARIANT 17: note = Any amino acid
  VARIANT 18: note = Any amino acid
  VARIANT 19: note = Any amino acid
  VARIANT 20: note = Any amino acid
  VARIANT 21: note = Any amino acid
  VARIANT 22: note = Any amino acid
  VARIANT 23: note = Any amino acid
  VARIANT 24: note = Any amino acid
  VARIANT 25: note = Any amino acid
  VARIANT 26: note = Any amino acid
  VARIANT 27: note = Any amino acid
  VARIANT 28: note = Any amino acid
  VARIANT 29: note = Any amino acid
  VARIANT 30: note = Any amino acid
  VARIANT 32: note = Any amino acid
  VARIANT 33: note = Any amino acid
  VARIANT 34: note = Any amino acid
  VARIANT 35: note = Any amino acid
  VARIANT 36: note = Any amino acid
  VARIANT 37: note = Any amino acid
  VARIANT 38: note = Any amino acid
  VARIANT 41: note = Any amino acid
  VARIANT 42: note = Any amino acid
  VARIANT 43: note = Any amino acid
  VARIANT 44: note = Any amino acid
  VARIANT 45: note = Any amino acid
  VARIANT 46: note = Any amino acid
  VARIANT 47: note = Any amino acid
  VARIANT 48: note = Any amino acid
  VARIANT 49: note = Any amino acid
  VARIANT 50: note = Any amino acid
  VARIANT 51: note = Any amino acid
GXXXXXXXXXXXXXXXXXXXXXXXXXXXXXGXXXXXXXTGXXXXXXXXXXXC

SEQ ID NO: 798124 - protein, 53 aa, unidentified
  VARIANT 2: note = Any amino acid
  VARIANT 3: note = Any amino acid
  VARIANT 4: note = Any amino acid
  VARIANT 5: note = Any amino acid
  VARIANT 6: note = Any amino acid
  VARIANT 7: note = Any amino acid
  VARIANT 8: note = Any amino acid
  VARIANT 9: note = Any amino acid
  VARIANT 10: note = Any amino acid
  VARIANT 11: note = Any amino acid
  VARIANT 12: note = Any amino acid
  VARIANT 13: note = Any amino acid
  VARIANT 14: note = Any amino acid
  VARIANT 15: note = Any amino acid
  VARIANT 16: note = Any amino acid
  VARIANT 17: note = Any amino acid
  VARIANT 18: note = Any amino acid
  VARIANT 19: note = Any amino acid
  VARIANT 20: note = Any amino acid
  VARIANT 21: note = Any amino acid
  VARIANT 22: note = Any amino acid
  VARIANT 23: note = Any amino acid
  VARIANT 24: note = Any amino acid
  VARIANT 25: note = Any amino acid
  VARIANT 26: note = Any amino acid
  VARIANT 27: note = Any amino acid
  VARIANT 28: note = Any amino acid
  VARIANT 29: note = Any amino acid
  VARIANT 30: note = Any amino acid
  VARIANT 32: note = Any amino acid
  VARIANT 33: note = Any amino acid
  VARIANT 34: note = Any amino acid
  VARIANT 35: note = Any amino acid
  VARIANT 36: note = Any amino acid
  VARIANT 37: note = Any amino acid
  VARIANT 38: note = Any amino acid
  VARIANT 41: note = Any amino acid
  VARIANT 42: note = Any amino acid
  VARIANT 43: note = Any amino acid
  VARIANT 44: note = Any amino acid
  VARIANT 45: note = Any amino acid
  VARIANT 46: note = Any amino acid
  VARIANT 47: note = Any amino acid
  VARIANT 48: note = Any amino acid
  VARIANT 49: note = Any amino acid
  VARIANT 50: note = Any amino acid
  VARIANT 51: note = Any amino acid
  VARIANT 52: note = Any amino acid
FXXXXXXXXXXXXXXXXXXXXXXXXXXXXXGXXXXXXXSGXXXXXXXXXXXXK

SEQ ID NO: 798125 - protein, 48 aa, unidentified
  VARIANT 2: note = Any amino acid
  VARIANT 3: note = Any amino acid
  VARIANT 4: note = Any amino acid
  VARIANT 5: note = Any amino acid
  VARIANT 6: note = Any amino acid
  VARIANT 7: note = Any amino acid
  VARIANT 8: note = Any amino acid
  VARIANT 9: note = Any amino acid
  VARIANT 10: note = Any amino acid
  VARIANT 11: note = Any amino acid
  VARIANT 12: note = Any amino acid
  VARIANT 13: note = Any amino acid
  VARIANT 14: note = Any amino acid
  VARIANT 15: note = Any amino acid
  VARIANT 16: note = Any amino acid
  VARIANT 17: note = Any amino acid
  VARIANT 18: note = Any amino acid
  VARIANT 19: note = Any amino acid
  VARIANT 20: note = Any amino acid
  VARIANT 21: note = Any amino acid
  VARIANT 22: note = Any amino acid
  VARIANT 23: note = Any amino acid
  VARIANT 24: note = Any amino acid
  VARIANT 25: note = Any amino acid
  VARIANT 26: note = Any amino acid
  VARIANT 28: note = Any amino acid
  VARIANT 29: note = Any amino acid
  VARIANT 30: note = Any amino acid
  VARIANT 31: note = Any amino acid
  VARIANT 32: note = Any amino acid
  VARIANT 33: note = Any amino acid
  VARIANT 34: note = Any amino acid
  VARIANT 37: note = Any amino acid
  VARIANT 38: note = Any amino acid
  VARIANT 39: note = Any amino acid
  VARIANT 40: note = Any amino acid
  VARIANT 41: note = Any amino acid
  VARIANT 42: note = Any amino acid
  VARIANT 43: note = Any amino acid
  VARIANT 44: note = Any amino acid
  VARIANT 45: note = Any amino acid
  VARIANT 46: note = Any amino acid
  VARIANT 47: note = Any amino acid
GXXXXXXXXXXXXXXXXXXXXXXXXXGXXXXXXXSGXXXXXXXXXXXG

SEQ ID NO: 798126 - protein, 52 aa, unidentified
  VARIANT 2: note = Any amino acid
  VARIANT 3: note = Any amino acid
  VARIANT 4: note = Any amino acid
  VARIANT 5: note = Any amino acid
  VARIANT 6: note = Any amino acid
  VARIANT 7: note = Any amino acid
  VARIANT 8: note = Any amino acid
  VARIANT 9: note = Any amino acid
  VARIANT 10: note = Any amino acid
  VARIANT 11: note = Any amino acid
  VARIANT 12: note = Any amino acid
  VARIANT 13: note = Any amino acid
  VARIANT 14: note = Any amino acid
  VARIANT 15: note = Any amino acid
  VARIANT 16: note = Any amino acid
  VARIANT 17: note = Any amino acid
  VARIANT 18: note = Any amino acid
  VARIANT 19: note = Any amino acid
  VARIANT 20: note = Any amino acid
  VARIANT 21: note = Any amino acid
  VARIANT 22: note = Any amino acid
  VARIANT 23: note = Any amino acid
  VARIANT 24: note = Any amino acid
  VARIANT 25: note = Any amino acid
  VARIANT 26: note = Any amino acid
  VARIANT 27: note = Any amino acid
  VARIANT 28: note = Any amino acid
  VARIANT 29: note = Any amino acid
  VARIANT 30: note = Any amino acid
  VARIANT 32: note = Any amino acid
  VARIANT 33: note = Any amino acid
  VARIANT 34: note = Any amino acid
  VARIANT 35: note = Any amino acid
  VARIANT 36: note = Any amino acid
  VARIANT 37: note = Any amino acid
  VARIANT 38: note = Any amino acid
  VARIANT 41: note = Any amino acid
  VARIANT 42: note = Any amino acid
  VARIANT 43: note = Any amino acid
  VARIANT 44: note = Any amino acid
  VARIANT 45: note = Any amino acid
  VARIANT 46: note = Any amino acid
  VARIANT 47: note = Any amino acid
  VARIANT 48: note = Any amino acid
  VARIANT 49: note = Any amino acid
  VARIANT 50: note = Any amino acid
  VARIANT 51: note = Any amino acid
GXXXXXXXXXXXXXXXXXXXXXXXXXXXXXEXXXXXXXSGXXXXXXXXXXXG

SEQ ID NO: 798127 - protein, 51 aa, unidentified
  VARIANT 2: note = Any amino acid
  VARIANT 3: note = Any amino acid
  VARIANT 4: note = Any amino acid
  VARIANT 5: note = Any amino acid
  VARIANT 6: note = Any amino acid
  VARIANT 7: note = Any amino acid
  VARIANT 8: note = Any amino acid
  VARIANT 9: note = Any amino acid
  VARIANT 10: note = Any amino acid
  VARIANT 11: note = Any amino acid
  VARIANT 12: note = Any amino acid
  VARIANT 13: note = Any amino acid
  VARIANT 14: note = Any amino acid
  VARIANT 15: note = Any amino acid
  VARIANT 16: note = Any amino acid
  VARIANT 17: note = Any amino acid
  VARIANT 18: note = Any amino acid
  VARIANT 19: note = Any amino acid
  VARIANT 20: note = Any amino acid
  VARIANT 21: note = Any amino acid
  VARIANT 22: note = Any amino acid
  VARIANT 23: note = Any amino acid
  VARIANT 24: note = Any amino acid
  VARIANT 25: note = Any amino acid
  VARIANT 26: note = Any amino acid
  VARIANT 27: note = Any amino acid
  VARIANT 28: note = Any amino acid
  VARIANT 29: note = Any amino acid
  VARIANT 31: note = Any amino acid
  VARIANT 32: note = Any amino acid
  VARIANT 33: note = Any amino acid
  VARIANT 34: note = Any amino acid
  VARIANT 35: note = Any amino acid
  VARIANT 36: note = Any amino acid
  VARIANT 37: note = Any amino acid
  VARIANT 40: note = Any amino acid
  VARIANT 41: note = Any amino acid
  VARIANT 42: note = Any amino acid
  VARIANT 43: note = Any amino acid
  VARIANT 44: note = Any amino acid
  VARIANT 45: note = Any amino acid
  VARIANT 46: note = Any amino acid
  VARIANT 47: note = Any amino acid
  VARIANT 48: note = Any amino acid
  VARIANT 49: note = Any amino acid
  VARIANT 50: note = Any amino acid
CXXXXXXXXXXXXXXXXXXXXXXXXXXXXGXXXXXXXSGXXXXXXXXXXXG

SEQ ID NO: 798128 - protein, 54 aa, unidentified
  VARIANT 2: note = Any amino acid
  VARIANT 3: note = Any amino acid
  VARIANT 4: note = Any amino acid
  VARIANT 5: note = Any amino acid
  VARIANT 6: note = Any amino acid
  VARIANT 7: note = Any amino acid
  VARIANT 8: note = Any amino acid
  VARIANT 9: note = Any amino acid
  VARIANT 10: note = Any amino acid
  VARIANT 11: note = Any amino acid
  VARIANT 12: note = Any amino acid
  VARIANT 13: note = Any amino acid
  VARIANT 14: note = Any amino acid
  VARIANT 15: note = Any amino acid
  VARIANT 16: note = Any amino acid
  VARIANT 17: note = Any amino acid
  VARIANT 18: note = Any amino acid
  VARIANT 19: note = Any amino acid
  VARIANT 20: note = Any amino acid
  VARIANT 21: note = Any amino acid
  VARIANT 22: note = Any amino acid
  VARIANT 23: note = Any amino acid
  VARIANT 24: note = Any amino acid
  VARIANT 25: note = Any amino acid
  VARIANT 26: note = Any amino acid
  VARIANT 27: note = Any amino acid
  VARIANT 28: note = Any amino acid
  VARIANT 29: note = Any amino acid
  VARIANT 30: note = Any amino acid
  VARIANT 31: note = Any amino acid
  VARIANT 33: note = Any amino acid
  VARIANT 34: note = Any amino acid
  VARIANT 35: note = Any amino acid
  VARIANT 36: note = Any amino acid
  VARIANT 37: note = Any amino acid
  VARIANT 38: note = Any amino acid
  VARIANT 39: note = Any amino acid
  VARIANT 42: note = Any amino acid
  VARIANT 43: note = Any amino acid
  VARIANT 44: note = Any amino acid
  VARIANT 45: note = Any amino acid
  VARIANT 46: note = Any amino acid
  VARIANT 47: note = Any amino acid
  VARIANT 48: note = Any amino acid
  VARIANT 49: note = Any amino acid
  VARIANT 50: note = Any amino acid
  VARIANT 51: note = Any amino acid
  VARIANT 52: note = Any amino acid
  VARIANT 53: note = Any amino acid
GXXXXXXXXXXXXXXXXXXXXXXXXXXXXXXGXXXXXXXTGXXXXXXXXXXXXG

SEQ ID NO: 798129 - protein, 52 aa, unidentified
  VARIANT 2: note = Any amino acid
  VARIANT 3: note = Any amino acid
  VARIANT 4: note = Any amino acid
  VARIANT 5: note = Any amino acid
  VARIANT 6: note = Any amino acid
  VARIANT 7: note = Any amino acid
  VARIANT 8: note = Any amino acid
  VARIANT 9: note = Any amino acid
  VARIANT 10: note = Any amino acid
  VARIANT 11: note = Any amino acid
  VARIANT 12: note = Any amino acid
  VARIANT 13: note = Any amino acid
  VARIANT 14: note = Any amino acid
  VARIANT 15: note = Any amino acid
  VARIANT 16: note = Any amino acid
  VARIANT 17: note = Any amino acid
  VARIANT 18: note = Any amino acid
  VARIANT 19: note = Any amino acid
  VARIANT 20: note = Any amino acid
  VARIANT 21: note = Any amino acid
  VARIANT 22: note = Any amino acid
  VARIANT 23: note = Any amino acid
  VARIANT 24: note = Any amino acid
  VARIANT 25: note = Any amino acid
  VARIANT 26: note = Any amino acid
  VARIANT 27: note = Any amino acid
  VARIANT 28: note = Any amino acid
  VARIANT 29: note = Any amino acid
  VARIANT 30: note = Any amino acid
  VARIANT 32: note = Any amino acid
  VARIANT 33: note = Any amino acid
  VARIANT 34: note = Any amino acid
  VARIANT 35: note = Any amino acid
  VARIANT 36: note = Any amino acid
  VARIANT 37: note = Any amino acid
  VARIANT 38: note = Any amino acid
  VARIANT 41: note = Any amino acid
  VARIANT 42: note = Any amino acid
  VARIANT 43: note = Any amino acid
  VARIANT 44: note = Any amino acid
  VARIANT 45: note = Any amino acid
  VARIANT 46: note = Any amino acid
  VARIANT 47: note = Any amino acid
  VARIANT 48: note = Any amino acid
  VARIANT 49: note = Any amino acid
  VARIANT 50: note = Any amino acid
  VARIANT 51: note = Any amino acid
NXXXXXXXXXXXXXXXXXXXXXXXXXXXXXGXXXXXXXSAXXXXXXXXXXXG

SEQ ID NO: 798130 - protein, 52 aa, unidentified
  VARIANT 2: note = Any amino acid
  VARIANT 3: note = Any amino acid
  VARIANT 4: note = Any amino acid
  VARIANT 5: note = Any amino acid
  VARIANT 6: note = Any amino acid
  VARIANT 7: note = Any amino acid
  VARIANT 8: note = Any amino acid
  VARIANT 9: note = Any amino acid
  VARIANT 10: note = Any amino acid
  VARIANT 11: note = Any amino acid
  VARIANT 12: note = Any amino acid
  VARIANT 13: note = Any amino acid
  VARIANT 14: note = Any amino acid
  VARIANT 15: note = Any amino acid
  VARIANT 16: note = Any amino acid
  VARIANT 17: note = Any amino acid
  VARIANT 18: note = Any amino acid
  VARIANT 19: note = Any amino acid
  VARIANT 20: note = Any amino acid
  VARIANT 21: note = Any amino acid
  VARIANT 22: note = Any amino acid
  VARIANT 23: note = Any amino acid
  VARIANT 24: note = Any amino acid
  VARIANT 25: note = Any amino acid
  VARIANT 26: note = Any amino acid
  VARIANT 27: note = Any amino acid
  VARIANT 28: note = Any amino acid
  VARIANT 29: note = Any amino acid
  VARIANT 30: note = Any amino acid
  VARIANT 32: note = Any amino acid
  VARIANT 33: note = Any amino acid
  VARIANT 34: note = Any amino acid
  VARIANT 35: note = Any amino acid
  VARIANT 36: note = Any amino acid
  VARIANT 37: note = Any amino acid
  VARIANT 38: note = Any amino acid
  VARIANT 41: note = Any amino acid
  VARIANT 42: note = Any amino acid
  VARIANT 43: note = Any amino acid
  VARIANT 44: note = Any amino acid
  VARIANT 45: note = Any amino acid
  VARIANT 46: note = Any amino acid
  VARIANT 47: note = Any amino acid
  VARIANT 48: note = Any amino acid
  VARIANT 49: note = Any amino acid
  VARIANT 50: note = Any amino acid
  VARIANT 51: note = Any amino acid
AXXXXXXXXXXXXXXXXXXXXXXXXXXXXXAXXXXXXXSGXXXXXXXXXXXG

SEQ ID NO: 798131 - protein, 53 aa, unidentified
  VARIANT 2: note = Any amino acid
  VARIANT 3: note = Any amino acid
  VARIANT 4: note = Any amino acid
  VARIANT 5: note = Any amino acid
  VARIANT 6: note = Any amino acid
  VARIANT 7: note = Any amino acid
  VARIANT 8: note = Any amino acid
  VARIANT 9: note = Any amino acid
  VARIANT 10: note = Any amino acid
  VARIANT 11: note = Any amino acid
  VARIANT 12: note = Any amino acid
  VARIANT 13: note = Any amino acid
  VARIANT 14: note = Any amino acid
  VARIANT 15: note = Any amino acid
  VARIANT 16: note = Any amino acid
  VARIANT 17: note = Any amino acid
  VARIANT 18: note = Any amino acid
  VARIANT 19: note = Any amino acid
  VARIANT 20: note = Any amino acid
  VARIANT 21: note = Any amino acid
  VARIANT 22: note = Any amino acid
  VARIANT 23: note = Any amino acid
  VARIANT 24: note = Any amino acid
  VARIANT 25: note = Any amino acid
  VARIANT 26: note = Any amino acid
  VARIANT 27: note = Any amino acid
  VARIANT 28: note = Any amino acid
  VARIANT 29: note = Any amino acid
  VARIANT 30: note = Any amino acid
  VARIANT 32: note = Any amino acid
  VARIANT 33: note = Any amino acid
  VARIANT 34: note = Any amino acid
  VARIANT 35: note = Any amino acid
  VARIANT 36: note = Any amino acid
  VARIANT 37: note = Any amino acid
  VARIANT 38: note = Any amino acid
  VARIANT 41: note = Any amino acid
  VARIANT 42: note = Any amino acid
  VARIANT 43: note = Any amino acid
  VARIANT 44: note = Any amino acid
  VARIANT 45: note = Any amino acid
  VARIANT 46: note = Any amino acid
  VARIANT 47: note = Any amino acid
  VARIANT 48: note = Any amino acid
  VARIANT 49: note = Any amino acid
  VARIANT 50: note = Any amino acid
  VARIANT 51: note = Any amino acid
  VARIANT 52: note = Any amino acid
AXXXXXXXXXXXXXXXXXXXXXXXXXXXXXGXXXXXXXSAXXXXXXXXXXXXK

SEQ ID NO: 798132 - protein, 51 aa, unidentified
  VARIANT 2: note = Any amino acid
  VARIANT 3: note = Any amino acid
  VARIANT 4: note = Any amino acid
  VARIANT 5: note = Any amino acid
  VARIANT 6: note = Any amino acid
  VARIANT 7: note = Any amino acid
  VARIANT 8: note = Any amino acid
  VARIANT 9: note = Any amino acid
  VARIANT 10: note = Any amino acid
  VARIANT 11: note = Any amino acid
  VARIANT 12: note = Any amino acid
  VARIANT 13: note = Any amino acid
  VARIANT 14: note = Any amino acid
  VARIANT 15: note = Any amino acid
  VARIANT 16: note = Any amino acid
  VARIANT 17: note = Any amino acid
  VARIANT 18: note = Any amino acid
  VARIANT 19: note = Any amino acid
  VARIANT 20: note = Any amino acid
  VARIANT 21: note = Any amino acid
  VARIANT 22: note = Any amino acid
  VARIANT 23: note = Any amino acid
  VARIANT 24: note = Any amino acid
  VARIANT 25: note = Any amino acid
  VARIANT 26: note = Any amino acid
  VARIANT 27: note = Any amino acid
  VARIANT 28: note = Any amino acid
  VARIANT 29: note = Any amino acid
  VARIANT 31: note = Any amino acid
  VARIANT 32: note = Any amino acid
  VARIANT 33: note = Any amino acid
  VARIANT 34: note = Any amino acid
  VARIANT 35: note = Any amino acid
  VARIANT 36: note = Any amino acid
  VARIANT 37: note = Any amino acid
  VARIANT 40: note = Any amino acid
  VARIANT 41: note = Any amino acid
  VARIANT 42: note = Any amino acid
  VARIANT 43: note = Any amino acid
  VARIANT 44: note = Any amino acid
  VARIANT 45: note = Any amino acid
  VARIANT 46: note = Any amino acid
  VARIANT 47: note = Any amino acid
  VARIANT 48: note = Any amino acid
  VARIANT 49: note = Any amino acid
  VARIANT 50: note = Any amino acid
GXXXXXXXXXXXXXXXXXXXXXXXXXXXXGXXXXXXXSAXXXXXXXXXXXG

SEQ ID NO: 798133 - protein, 53 aa, unidentified
  VARIANT 2: note = Any amino acid
  VARIANT 3: note = Any amino acid
  VARIANT 4: note = Any amino acid
  VARIANT 5: note = Any amino acid
  VARIANT 6: note = Any amino acid
  VARIANT 7: note = Any amino acid
  VARIANT 8: note = Any amino acid
  VARIANT 9: note = Any amino acid
  VARIANT 10: note = Any amino acid
  VARIANT 11: note = Any amino acid
  VARIANT 12: note = Any amino acid
  VARIANT 13: note = Any amino acid
  VARIANT 14: note = Any amino acid
  VARIANT 15: note = Any amino acid
  VARIANT 16: note = Any amino acid
  VARIANT 17: note = Any amino acid
  VARIANT 18: note = Any amino acid
  VARIANT 19: note = Any amino acid
  VARIANT 20: note = Any amino acid
  VARIANT 21: note = Any amino acid
  VARIANT 22: note = Any amino acid
  VARIANT 23: note = Any amino acid
  VARIANT 24: note = Any amino acid
  VARIANT 25: note = Any amino acid
  VARIANT 26: note = Any amino acid
  VARIANT 27: note = Any amino acid
  VARIANT 28: note = Any amino acid
  VARIANT 29: note = Any amino acid
  VARIANT 30: note = Any amino acid
  VARIANT 32: note = Any amino acid
  VARIANT 33: note = Any amino acid
  VARIANT 34: note = Any amino acid
  VARIANT 35: note = Any amino acid
  VARIANT 36: note = Any amino acid
  VARIANT 37: note = Any amino acid
  VARIANT 38: note = Any amino acid
  VARIANT 41: note = Any amino acid
  VARIANT 42: note = Any amino acid
  VARIANT 43: note = Any amino acid
  VARIANT 44: note = Any amino acid
  VARIANT 45: note = Any amino acid
  VARIANT 46: note = Any amino acid
  VARIANT 47: note = Any amino acid
  VARIANT 48: note = Any amino acid
  VARIANT 49: note = Any amino acid
  VARIANT 50: note = Any amino acid
  VARIANT 51: note = Any amino acid
  VARIANT 52: note = Any amino acid
RXXXXXXXXXXXXXXXXXXXXXXXXXXXXXGXXXXXXXSGXXXXXXXXXXXXK

SEQ ID NO: 798134 - protein, 53 aa, unidentified
  VARIANT 2: note = Any amino acid
  VARIANT 3: note = Any amino acid
  VARIANT 4: note = Any amino acid
  VARIANT 5: note = Any amino acid
  VARIANT 6: note = Any amino acid
  VARIANT 7: note = Any amino acid
  VARIANT 8: note = Any amino acid
  VARIANT 9: note = Any amino acid
  VARIANT 10: note = Any amino acid
  VARIANT 11: note = Any amino acid
  VARIANT 12: note = Any amino acid
  VARIANT 13: note = Any amino acid
  VARIANT 14: note = Any amino acid
  VARIANT 15: note = Any amino acid
  VARIANT 16: note = Any amino acid
  VARIANT 17: note = Any amino acid
  VARIANT 18: note = Any amino acid
  VARIANT 19: note = Any amino acid
  VARIANT 20: note = Any amino acid
  VARIANT 21: note = Any amino acid
  VARIANT 22: note = Any amino acid
  VARIANT 23: note = Any amino acid
  VARIANT 24: note = Any amino acid
  VARIANT 25: note = Any amino acid
  VARIANT 26: note = Any amino acid
  VARIANT 27: note = Any amino acid
  VARIANT 28: note = Any amino acid
  VARIANT 29: note = Any amino acid
  VARIANT 30: note = Any amino acid
  VARIANT 32: note = Any amino acid
  VARIANT 33: note = Any amino acid
  VARIANT 34: note = Any amino acid
  VARIANT 35: note = Any amino acid
  VARIANT 36: note = Any amino acid
  VARIANT 37: note = Any amino acid
  VARIANT 38: note = Any amino acid
  VARIANT 41: note = Any amino acid
  VARIANT 42: note = Any amino acid
  VARIANT 43: note = Any amino acid
  VARIANT 44: note = Any amino acid
  VARIANT 45: note = Any amino acid
  VARIANT 46: note = Any amino acid
  VARIANT 47: note = Any amino acid
  VARIANT 48: note = Any amino acid
  VARIANT 49: note = Any amino acid
  VARIANT 50: note = Any amino acid
  VARIANT 51: note = Any amino acid
  VARIANT 52: note = Any amino acid
SXXXXXXXXXXXXXXXXXXXXXXXXXXXXXGXXXXXXXSGXXXXXXXXXXXXK

SEQ ID NO: 798135 - protein, 53 aa, unidentified
  VARIANT 2: note = Any amino acid
  VARIANT 3: note = Any amino acid
  VARIANT 4: note = Any amino acid
  VARIANT 5: note = Any amino acid
  VARIANT 6: note = Any amino acid
  VARIANT 7: note = Any amino acid
  VARIANT 8: note = Any amino acid
  VARIANT 9: note = Any amino acid
  VARIANT 10: note = Any amino acid
  VARIANT 11: note = Any amino acid
  VARIANT 12: note = Any amino acid
  VARIANT 13: note = Any amino acid
  VARIANT 14: note = Any amino acid
  VARIANT 15: note = Any amino acid
  VARIANT 16: note = Any amino acid
  VARIANT 17: note = Any amino acid
  VARIANT 18: note = Any amino acid
  VARIANT 19: note = Any amino acid
  VARIANT 20: note = Any amino acid
  VARIANT 21: note = Any amino acid
  VARIANT 22: note = Any amino acid
  VARIANT 23: note = Any amino acid
  VARIANT 24: note = Any amino acid
  VARIANT 25: note = Any amino acid
  VARIANT 26: note = Any amino acid
  VARIANT 27: note = Any amino acid
  VARIANT 28: note = Any amino acid
  VARIANT 29: note = Any amino acid
  VARIANT 30: note = Any amino acid
  VARIANT 31: note = Any amino acid
  VARIANT 33: note = Any amino acid
  VARIANT 34: note = Any amino acid
  VARIANT 35: note = Any amino acid
  VARIANT 36: note = Any amino acid
  VARIANT 37: note = Any amino acid
  VARIANT 38: note = Any amino acid
  VARIANT 39: note = Any amino acid
  VARIANT 42: note = Any amino acid
  VARIANT 43: note = Any amino acid
  VARIANT 44: note = Any amino acid
  VARIANT 45: note = Any amino acid
  VARIANT 46: note = Any amino acid
  VARIANT 47: note = Any amino acid
  VARIANT 48: note = Any amino acid
  VARIANT 49: note = Any amino acid
  VARIANT 50: note = Any amino acid
  VARIANT 51: note = Any amino acid
  VARIANT 52: note = Any amino acid
AXXXXXXXXXXXXXXXXXXXXXXXXXXXXXXGXXXXXXXSGXXXXXXXXXXXG

SEQ ID NO: 798136 - protein, 52 aa, unidentified
  VARIANT 2: note = Any amino acid
  VARIANT 3: note = Any amino acid
  VARIANT 4: note = Any amino acid
  VARIANT 5: note = Any amino acid
  VARIANT 6: note = Any amino acid
  VARIANT 7: note = Any amino acid
  VARIANT 8: note = Any amino acid
  VARIANT 9: note = Any amino acid
  VARIANT 10: note = Any amino acid
  VARIANT 11: note = Any amino acid
  VARIANT 12: note = Any amino acid
  VARIANT 13: note = Any amino acid
  VARIANT 14: note = Any amino acid
  VARIANT 15: note = Any amino acid
  VARIANT 16: note = Any amino acid
  VARIANT 17: note = Any amino acid
  VARIANT 18: note = Any amino acid
  VARIANT 19: note = Any amino acid
  VARIANT 20: note = Any amino acid
  VARIANT 21: note = Any amino acid
  VARIANT 22: note = Any amino acid
  VARIANT 23: note = Any amino acid
  VARIANT 24: note = Any amino acid
  VARIANT 25: note = Any amino acid
  VARIANT 26: note = Any amino acid
  VARIANT 27: note = Any amino acid
  VARIANT 28: note = Any amino acid
  VARIANT 29: note = Any amino acid
  VARIANT 30: note = Any amino acid
  VARIANT 32: note = Any amino acid
  VARIANT 33: note = Any amino acid
  VARIANT 34: note = Any amino acid
  VARIANT 35: note = Any amino acid
  VARIANT 36: note = Any amino acid
  VARIANT 37: note = Any amino acid
  VARIANT 38: note = Any amino acid
  VARIANT 41: note = Any amino acid
  VARIANT 42: note = Any amino acid
  VARIANT 43: note = Any amino acid
  VARIANT 44: note = Any amino acid
  VARIANT 45: note = Any amino acid
  VARIANT 46: note = Any amino acid
  VARIANT 47: note = Any amino acid
  VARIANT 48: note = Any amino acid
  VARIANT 49: note = Any amino acid
  VARIANT 50: note = Any amino acid
  VARIANT 51: note = Any amino acid
GXXXXXXXXXXXXXXXXXXXXXXXXXXXXXDXXXXXXXSGXXXXXXXXXXXG

SEQ ID NO: 798137 - protein, 52 aa, unidentified
  VARIANT 2: note = Any amino acid
  VARIANT 3: note = Any amino acid
  VARIANT 4: note = Any amino acid
  VARIANT 5: note = Any amino acid
  VARIANT 6: note = Any amino acid
  VARIANT 7: note = Any amino acid
  VARIANT 8: note = Any amino acid
  VARIANT 9: note = Any amino acid
  VARIANT 10: note = Any amino acid
  VARIANT 11: note = Any amino acid
  VARIANT 12: note = Any amino acid
  VARIANT 13: note = Any amino acid
  VARIANT 14: note = Any amino acid
  VARIANT 15: note = Any amino acid
  VARIANT 16: note = Any amino acid
  VARIANT 17: note = Any amino acid
  VARIANT 18: note = Any amino acid
  VARIANT 19: note = Any amino acid
  VARIANT 20: note = Any amino acid
  VARIANT 21: note = Any amino acid
  VARIANT 22: note = Any amino acid
  VARIANT 23: note = Any amino acid
  VARIANT 24: note = Any amino acid
  VARIANT 25: note = Any amino acid
  VARIANT 26: note = Any amino acid
  VARIANT 27: note = Any amino acid
  VARIANT 28: note = Any amino acid
  VARIANT 29: note = Any amino acid
  VARIANT 30: note = Any amino acid
  VARIANT 32: note = Any amino acid
  VARIANT 33: note = Any amino acid
  VARIANT 34: note = Any amino acid
  VARIANT 35: note = Any amino acid
  VARIANT 36: note = Any amino acid
  VARIANT 37: note = Any amino acid
  VARIANT 38: note = Any amino acid
  VARIANT 41: note = Any amino acid
  VARIANT 42: note = Any amino acid
  VARIANT 43: note = Any amino acid
  VARIANT 44: note = Any amino acid
  VARIANT 45: note = Any amino acid
  VARIANT 46: note = Any amino acid
  VARIANT 47: note = Any amino acid
  VARIANT 48: note = Any amino acid
  VARIANT 49: note = Any amino acid
  VARIANT 50: note = Any amino acid
  VARIANT 51: note = Any amino acid
GXXXXXXXXXXXXXXXXXXXXXXXXXXXXXGXXXXXXXSGXXXXXXXXXXXD

SEQ ID NO: 798138 - protein, 52 aa, unidentified
  VARIANT 2: note = Any amino acid
  VARIANT 3: note = Any amino acid
  VARIANT 4: note = Any amino acid
  VARIANT 5: note = Any amino acid
  VARIANT 6: note = Any amino acid
  VARIANT 7: note = Any amino acid
  VARIANT 8: note = Any amino acid
  VARIANT 9: note = Any amino acid
  VARIANT 10: note = Any amino acid
  VARIANT 11: note = Any amino acid
  VARIANT 12: note = Any amino acid
  VARIANT 13: note = Any amino acid
  VARIANT 14: note = Any amino acid
  VARIANT 15: note = Any amino acid
  VARIANT 16: note = Any amino acid
  VARIANT 17: note = Any amino acid
  VARIANT 18: note = Any amino acid
  VARIANT 19: note = Any amino acid
  VARIANT 20: note = Any amino acid
  VARIANT 21: note = Any amino acid
  VARIANT 22: note = Any amino acid
  VARIANT 23: note = Any amino acid
  VARIANT 24: note = Any amino acid
  VARIANT 25: note = Any amino acid
  VARIANT 26: note = Any amino acid
  VARIANT 27: note = Any amino acid
  VARIANT 28: note = Any amino acid
  VARIANT 29: note = Any amino acid
  VARIANT 30: note = Any amino acid
  VARIANT 32: note = Any amino acid
  VARIANT 33: note = Any amino acid
  VARIANT 34: note = Any amino acid
  VARIANT 35: note = Any amino acid
  VARIANT 36: note = Any amino acid
  VARIANT 37: note = Any amino acid
  VARIANT 38: note = Any amino acid
  VARIANT 41: note = Any amino acid
  VARIANT 42: note = Any amino acid
  VARIANT 43: note = Any amino acid
  VARIANT 44: note = Any amino acid
  VARIANT 45: note = Any amino acid
  VARIANT 46: note = Any amino acid
  VARIANT 47: note = Any amino acid
  VARIANT 48: note = Any amino acid
  VARIANT 49: note = Any amino acid
  VARIANT 50: note = Any amino acid
  VARIANT 51: note = Any amino acid
GXXXXXXXXXXXXXXXXXXXXXXXXXXXXXGXXXXXXXTGXXXXXXXXXXXK

SEQ ID NO: 798139 - protein, 52 aa, unidentified
  VARIANT 2: note = Any amino acid
  VARIANT 3: note = Any amino acid
  VARIANT 4: note = Any amino acid
  VARIANT 5: note = Any amino acid
  VARIANT 6: note = Any amino acid
  VARIANT 7: note = Any amino acid
  VARIANT 8: note = Any amino acid
  VARIANT 9: note = Any amino acid
  VARIANT 10: note = Any amino acid
  VARIANT 11: note = Any amino acid
  VARIANT 12: note = Any amino acid
  VARIANT 13: note = Any amino acid
  VARIANT 14: note = Any amino acid
  VARIANT 15: note = Any amino acid
  VARIANT 16: note = Any amino acid
  VARIANT 17: note = Any amino acid
  VARIANT 18: note = Any amino acid
  VARIANT 19: note = Any amino acid
  VARIANT 20: note = Any amino acid
  VARIANT 21: note = Any amino acid
  VARIANT 22: note = Any amino acid
  VARIANT 23: note = Any amino acid
  VARIANT 24: note = Any amino acid
  VARIANT 25: note = Any amino acid
  VARIANT 26: note = Any amino acid
  VARIANT 27: note = Any amino acid
  VARIANT 28: note = Any amino acid
  VARIANT 29: note = Any amino acid
  VARIANT 30: note = Any amino acid
  VARIANT 32: note = Any amino acid
  VARIANT 33: note = Any amino acid
  VARIANT 34: note = Any amino acid
  VARIANT 35: note = Any amino acid
  VARIANT 36: note = Any amino acid
  VARIANT 37: note = Any amino acid
  VARIANT 38: note = Any amino acid
  VARIANT 41: note = Any amino acid
  VARIANT 42: note = Any amino acid
  VARIANT 43: note = Any amino acid
  VARIANT 44: note = Any amino acid
  VARIANT 45: note = Any amino acid
  VARIANT 46: note = Any amino acid
  VARIANT 47: note = Any amino acid
  VARIANT 48: note = Any amino acid
  VARIANT 49: note = Any amino acid
  VARIANT 50: note = Any amino acid
  VARIANT 51: note = Any amino acid
GXXXXXXXXXXXXXXXXXXXXXXXXXXXXXGXXXXXXXTGXXXXXXXXXXXV

SEQ ID NO: 798140 - protein, 5 aa, unidentified
  VARIANT 4: note = V or I
IPGXG

SEQ ID NO: 798141 - protein, 5 aa, unidentified
HPGVG

SEQ ID NO: 798142 - protein, 5 aa, unidentified
LRGVA

SEQ ID NO: 798143 - protein, 5 aa, unidentified
FRGID

SEQ ID NO: 798144 - protein, 5 aa, unidentified
LRGVS

SEQ ID NO: 798145 - protein, 5 aa, unidentified
LRGID

SEQ ID NO: 798146 - protein, 5 aa, unidentified
LRGIA

SEQ ID NO: 798147 - protein, 5 aa, unidentified
LRGVQ

SEQ ID NO: 798148 - protein, 5 aa, unidentified
LRGIS

SEQ ID NO: 798149 - protein, 5 aa, unidentified
LEGVG

SEQ ID NO: 798150 - protein, 5 aa, unidentified
HPGIG

SEQ ID NO: 798151 - protein, 5 aa, unidentified
LRGVD

SEQ ID NO: 798152 - protein, 5 aa, unidentified
VPGVN

SEQ ID NO: 798153 - protein, 5 aa, unidentified
IPFLG

SEQ ID NO: 798154 - protein, 5 aa, unidentified
LRAIG

SEQ ID NO: 798155 - protein, 5 aa, unidentified
HYGIG

SEQ ID NO: 798156 - protein, 5 aa, unidentified
FKGID

SEQ ID NO: 798157 - protein, 5 aa, unidentified
MRGID

SEQ ID NO: 798158 - protein, 5 aa, unidentified
LKGID

SEQ ID NO: 798159 - protein, 5 aa, unidentified
LRGVK

SEQ ID NO: 798160 - protein, 5 aa, unidentified
MRGVA

SEQ ID NO: 798161 - protein, 5 aa, unidentified
APGFG

SEQ ID NO: 798162 - protein, 5 aa, unidentified
LRGVR

SEQ ID NO: 798163 - protein, 5 aa, unidentified
FRGIS

SEQ ID NO: 798164 - protein, 5 aa, unidentified
LKSIG

SEQ ID NO: 798165 - protein, 5 aa, unidentified
CPGLG

SEQ ID NO: 798166 - protein, 5 aa, unidentified
MRGVS

SEQ ID NO: 798167 - protein, 5 aa, unidentified
CPGIG

SEQ ID NO: 798168 - protein, 5 aa, unidentified
IPQLG

SEQ ID NO: 798169 - protein, 5 aa, unidentified
LKAIG

SEQ ID NO: 798170 - protein, 5 aa, unidentified
FRGVD

SEQ ID NO: 798171 - protein, 5 aa, unidentified
LAGIG

SEQ ID NO: 798172 - protein, 5 aa, unidentified
YRGVT

SEQ ID NO: 798173 - protein, 5 aa, unidentified
MKGIS

SEQ ID NO: 798174 - protein, 5 aa, unidentified
VPFLG

SEQ ID NO: 798175 - protein, 5 aa, unidentified
LIGVK

SEQ ID NO: 798176 - protein, 5 aa, unidentified
LRGFQ

SEQ ID NO: 798177 - protein, 5 aa, unidentified
LEGIG

SEQ ID NO: 798178 - protein, 5 aa, unidentified
APGMG

SEQ ID NO: 798179 - protein, 5 aa, unidentified
FRGIG

SEQ ID NO: 798180 - protein, 5 aa, unidentified
LKAVG

SEQ ID NO: 798181 - protein, 5 aa, unidentified
LKSLG

SEQ ID NO: 798182 - protein, 5 aa, unidentified
LVGIG

SEQ ID NO: 798183 - protein, 5 aa, unidentified
IPFFG

SEQ ID NO: 798184 - protein, 5 aa, unidentified
LCGIG

SEQ ID NO: 798185 - protein, 5 aa, unidentified
LRGVN

SEQ ID NO: 798186 - protein, 5 aa, unidentified
CPGVG

SEQ ID NO: 798187 - protein, 5 aa, unidentified
LRGIK

SEQ ID NO: 798188 - protein, 5 aa, unidentified
FHGID

SEQ ID NO: 798189 - protein, 5 aa, unidentified
ITGVN

SEQ ID NO: 798190 - protein, 5 aa, unidentified
LCGVR

SEQ ID NO: 798191 - protein, 5 aa, unidentified
YRGIA

SEQ ID NO: 798192 - protein, 5 aa, unidentified
FRGIQ

SEQ ID NO: 798193 - protein, 5 aa, unidentified
LRGLD

SEQ ID NO: 798194 - protein, 5 aa, unidentified
VWGIG

SEQ ID NO: 798195 - protein, 5 aa, unidentified
FRGIA

SEQ ID NO: 798196 - protein, 5 aa, unidentified
LRSIG

SEQ ID NO: 798197 - protein, 5 aa, unidentified
FIGIK

SEQ ID NO: 798198 - protein, 5 aa, unidentified
MRGIS

SEQ ID NO: 798199 - protein, 5 aa, unidentified
TPAVG

SEQ ID NO: 798200 - protein, 5 aa, unidentified
LPCVG

SEQ ID NO: 798201 - protein, 5 aa, unidentified
MRGIA

SEQ ID NO: 798202 - protein, 5 aa, unidentified
VLGIG

SEQ ID NO: 798203 - protein, 5 aa, unidentified
LRGIQ

SEQ ID NO: 798204 - protein, 5 aa, unidentified
FLGIK

SEQ ID NO: 798205 - protein, 5 aa, unidentified
MRGVQ

SEQ ID NO: 798206 - protein, 5 aa, unidentified
FRGIE

SEQ ID NO: 798207 - protein, 5 aa, unidentified
LKGVD

SEQ ID NO: 798208 - protein, 5 aa, unidentified
MRGVR

SEQ ID NO: 798209 - protein, 5 aa, unidentified
IPYVG

SEQ ID NO: 798210 - protein, 5 aa, unidentified
MKGVS

SEQ ID NO: 798211 - protein, 5 aa, unidentified
IPYLG

SEQ ID NO: 798212 - protein, 5 aa, unidentified
LRGIR

SEQ ID NO: 798213 - protein, 5 aa, unidentified
IPFIG

SEQ ID NO: 798214 - protein, 5 aa, unidentified
LRGVE

SEQ ID NO: 798215 - protein, 5 aa, unidentified
EKGVG

SEQ ID NO: 798216 - protein, 5 aa, unidentified
IPSLG

SEQ ID NO: 798217 - protein, 5 aa, unidentified
LLGIG

SEQ ID NO: 798218 - protein, 5 aa, unidentified
MTGIG

SEQ ID NO: 798219 - protein, 5 aa, unidentified
VPTIG

SEQ ID NO: 798220 - protein, 5 aa, unidentified
LRGVP

SEQ ID NO: 798221 - protein, 5 aa, unidentified
QAGVG

SEQ ID NO: 798222 - protein, 5 aa, unidentified
LKGIA

SEQ ID NO: 798223 - protein, 5 aa, unidentified
IPRLG

SEQ ID NO: 798224 - protein, 5 aa, unidentified
LRGIN

SEQ ID NO: 798225 - protein, 5 aa, unidentified
VLGVG

SEQ ID NO: 798226 - protein, 5 aa, unidentified
FRGIK

SEQ ID NO: 798227 - protein, 5 aa, unidentified
IPQVG

SEQ ID NO: 798228 - protein, 5 aa, unidentified
QRGVG

SEQ ID NO: 798229 - protein, 5 aa, unidentified
LMGVG

SEQ ID NO: 798230 - protein, 5 aa, unidentified
LRGFD

SEQ ID NO: 798231 - protein, 5 aa, unidentified
HYGVG

SEQ ID NO: 798232 - protein, 5 aa, unidentified
VYGIG

SEQ ID NO: 798233 - protein, 5 aa, unidentified
FKGIK

SEQ ID NO: 798234 - protein, 5 aa, unidentified
FRGLD

SEQ ID NO: 798235 - protein, 5 aa, unidentified
LGGIG

SEQ ID NO: 798236 - protein, 5 aa, unidentified
APAIG

SEQ ID NO: 798237 - protein, 5 aa, unidentified
APSVG

SEQ ID NO: 798238 - protein, 5 aa, unidentified
HFGIG

SEQ ID NO: 798239 - protein, 5 aa, unidentified
MRGIQ

SEQ ID NO: 798240 - protein, 5 aa, unidentified
YRGIT

SEQ ID NO: 798241 - protein, 5 aa, unidentified
LQGIG

SEQ ID NO: 798242 - protein, 5 aa, unidentified
ARGVS

SEQ ID NO: 798243 - protein, 5 aa, unidentified
FIGVK

SEQ ID NO: 798244 - protein, 5 aa, unidentified
FRGFQ

SEQ ID NO: 798245 - protein, 5 aa, unidentified
LRGLG

SEQ ID NO: 798246 - protein, 5 aa, unidentified
QSGVG

SEQ ID NO: 798247 - protein, 5 aa, unidentified
VWGVG

SEQ ID NO: 798248 - protein, 5 aa, unidentified
HKGVG

SEQ ID NO: 798249 - protein, 5 aa, unidentified
IPGTG

SEQ ID NO: 798250 - protein, 5 aa, unidentified
LKALG

SEQ ID NO: 798251 - protein, 5 aa, unidentified
IKGID

SEQ ID NO: 798252 - protein, 5 aa, unidentified
LMGIG

SEQ ID NO: 798253 - protein, 5 aa, unidentified
VPGPA

SEQ ID NO: 798254 - protein, 5 aa, unidentified
YRGID

SEQ ID NO: 798255 - protein, 5 aa, unidentified
ILGVG

SEQ ID NO: 798256 - protein, 5 aa, unidentified
LTGVD

SEQ ID NO: 798257 - protein, 5 aa, unidentified
IPALG

SEQ ID NO: 798258 - protein, 5 aa, unidentified
LEGVS

SEQ ID NO: 798259 - protein, 5 aa, unidentified
LPGYG

SEQ ID NO: 798260 - protein, 5 aa, unidentified
LRAVG

SEQ ID NO: 798261 - protein, 5 aa, unidentified
VPTLG

SEQ ID NO: 798262 - protein, 5 aa, unidentified
APGYG

SEQ ID NO: 798263 - protein, 5 aa, unidentified
FRGFK

SEQ ID NO: 798264 - protein, 5 aa, unidentified
FTGID

SEQ ID NO: 798265 - protein, 5 aa, unidentified
LRGIE

SEQ ID NO: 798266 - protein, 5 aa, unidentified
APCVG

SEQ ID NO: 798267 - protein, 5 aa, unidentified
LCGIR

SEQ ID NO: 798268 - protein, 5 aa, unidentified
LRGLA

SEQ ID NO: 798269 - protein, 5 aa, unidentified
MPKVG

SEQ ID NO: 798270 - protein, 5 aa, unidentified
MRGLD

SEQ ID NO: 798271 - protein, 5 aa, unidentified
APAVG

SEQ ID NO: 798272 - protein, 5 aa, unidentified
IPYIG

SEQ ID NO: 798273 - protein, 5 aa, unidentified
PKGVG

SEQ ID NO: 798274 - protein, 5 aa, unidentified
VGGIG

SEQ ID NO: 798275 - protein, 5 aa, unidentified
YKGIK

SEQ ID NO: 798276 - protein, 5 aa, unidentified
CPGIA

SEQ ID NO: 798277 - protein, 5 aa, unidentified
FKGFQ

SEQ ID NO: 798278 - protein, 5 aa, unidentified
LPGVN

SEQ ID NO: 798279 - protein, 5 aa, unidentified
PAGVG

SEQ ID NO: 798280 - protein, 5 aa, unidentified
TPSVG

SEQ ID NO: 798281 - protein, 5 aa, unidentified
TTGVG

SEQ ID NO: 798282 - protein, 5 aa, unidentified
CPGMG

SEQ ID NO: 798283 - protein, 5 aa, unidentified
FRGIN

SEQ ID NO: 798284 - protein, 5 aa, unidentified
IPQIG

SEQ ID NO: 798285 - protein, 5 aa, unidentified
IPTLG

SEQ ID NO: 798286 - protein, 5 aa, unidentified
LRGMA

SEQ ID NO: 798287 - protein, 5 aa, unidentified
LRGYR

SEQ ID NO: 798288 - protein, 5 aa, unidentified
FRGIR

SEQ ID NO: 798289 - protein, 5 aa, unidentified
SPGIG

SEQ ID NO: 798290 - protein, 5 aa, unidentified
YRGVA

SEQ ID NO: 798291 - protein, 5 aa, unidentified
LGAIG

SEQ ID NO: 798292 - protein, 5 aa, unidentified
LIGIK

SEQ ID NO: 798293 - protein, 5 aa, unidentified
VPRLG

SEQ ID NO: 798294 - protein, 5 aa, unidentified
VRGLG

SEQ ID NO: 798295 - protein, 5 aa, unidentified
APSIG

SEQ ID NO: 798296 - protein, 5 aa, unidentified
FLGVK

SEQ ID NO: 798297 - protein, 5 aa, unidentified
IPRVG

SEQ ID NO: 798298 - protein, 5 aa, unidentified
LIGIG

SEQ ID NO: 798299 - protein, 5 aa, unidentified
LMGVR

SEQ ID NO: 798300 - protein, 5 aa, unidentified
MRGVK

SEQ ID NO: 798301 - protein, 5 aa, unidentified
FKGIS

SEQ ID NO: 798302 - protein, 5 aa, unidentified
FRGFD

SEQ ID NO: 798303 - protein, 5 aa, unidentified
IKGIT

SEQ ID NO: 798304 - protein, 5 aa, unidentified
IPNVG

SEQ ID NO: 798305 - protein, 5 aa, unidentified
LKSVG

SEQ ID NO: 798306 - protein, 5 aa, unidentified
LPSVG

SEQ ID NO: 798307 - protein, 5 aa, unidentified
QYGIG

SEQ ID NO: 798308 - protein, 5 aa, unidentified
IGLVP

SEQ ID NO: 798309 - protein, 5 aa, unidentified
FGLTP

SEQ ID NO: 798310 - protein, 5 aa, unidentified
IGLTP

SEQ ID NO: 798311 - protein, 5 aa, unidentified
FGLVP

SEQ ID NO: 798312 - protein, 5 aa, unidentified
LGLRP

SEQ ID NO: 798313 - protein, 5 aa, unidentified
AGLTG

SEQ ID NO: 798314 - protein, 5 aa, unidentified
VGLIP

SEQ ID NO: 798315 - protein, 5 aa, unidentified
CRLVK

SEQ ID NO: 798316 - protein, 5 aa, unidentified
LGIVP

SEQ ID NO: 798317 - protein, 5 aa, unidentified
FGIVP

SEQ ID NO: 798318 - protein, 5 aa, unidentified
ARLVK

SEQ ID NO: 798319 - protein, 5 aa, unidentified
AGLGA

SEQ ID NO: 798320 - protein, 5 aa, unidentified
CGLCS

SEQ ID NO: 798321 - protein, 5 aa, unidentified
CRCVK

SEQ ID NO: 798322 - protein, 5 aa, unidentified
CGLAV

SEQ ID NO: 798323 - protein, 5 aa, unidentified
CRCVG

SEQ ID NO: 798324 - protein, 5 aa, unidentified
CGLGI

SEQ ID NO: 798325 - protein, 5 aa, unidentified
CRLVP

SEQ ID NO: 798326 - protein, 5 aa, unidentified
CRCVD

SEQ ID NO: 798327 - protein, 5 aa, unidentified
AGLAV

SEQ ID NO: 798328 - protein, 5 aa, unidentified
CGLCG

SEQ ID NO: 798329 - protein, 5 aa, unidentified
WGLTP

SEQ ID NO: 798330 - protein, 5 aa, unidentified
LGMVP

SEQ ID NO: 798331 - protein, 5 aa, unidentified
IGLIP

SEQ ID NO: 798332 - protein, 5 aa, unidentified
CRKVP

SEQ ID NO: 798333 - protein, 5 aa, unidentified
ARLVR

SEQ ID NO: 798334 - protein, 5 aa, unidentified
SRLVK

SEQ ID NO: 798335 - protein, 5 aa, unidentified
MGLTP

SEQ ID NO: 798336 - protein, 5 aa, unidentified
LGITP

SEQ ID NO: 798337 - protein, 5 aa, unidentified
VGLRP

SEQ ID NO: 798338 - protein, 5 aa, unidentified
LGMTP

SEQ ID NO: 798339 - protein, 5 aa, unidentified
CGLTS

SEQ ID NO: 798340 - protein, 5 aa, unidentified
ARCVD

SEQ ID NO: 798341 - protein, 5 aa, unidentified
MGLVP

SEQ ID NO: 798342 - protein, 5 aa, unidentified
FGLNP

SEQ ID NO: 798343 - protein, 5 aa, unidentified
CGLAL

SEQ ID NO: 798344 - protein, 5 aa, unidentified
IGIVP

SEQ ID NO: 798345 - protein, 5 aa, unidentified
LRSAP

SEQ ID NO: 798346 - protein, 5 aa, unidentified
FGMTP

SEQ ID NO: 798347 - protein, 5 aa, unidentified
SLLAP

SEQ ID NO: 798348 - protein, 5 aa, unidentified
SGLAV

SEQ ID NO: 798349 - protein, 5 aa, unidentified
VGMIP

SEQ ID NO: 798350 - protein, 5 aa, unidentified
AGVIP

SEQ ID NO: 798351 - protein, 5 aa, unidentified
CGVGL

SEQ ID NO: 798352 - protein, 5 aa, unidentified
LGLVS

SEQ ID NO: 798353 - protein, 5 aa, unidentified
LGLTT

SEQ ID NO: 798354 - protein, 5 aa, unidentified
AGLTA

SEQ ID NO: 798355 - protein, 5 aa, unidentified
VGIVP

SEQ ID NO: 798356 - protein, 5 aa, unidentified
CGLVK

SEQ ID NO: 798357 - protein, 5 aa, unidentified
SGAVP

SEQ ID NO: 798358 - protein, 5 aa, unidentified
VGLAV

SEQ ID NO: 798359 - protein, 5 aa, unidentified
VGLTG

SEQ ID NO: 798360 - protein, 5 aa, unidentified
TGLDI

SEQ ID NO: 798361 - protein, 5 aa, unidentified
FGLIP

SEQ ID NO: 798362 - protein, 5 aa, unidentified
CRCVR

SEQ ID NO: 798363 - protein, 5 aa, unidentified
SGLGI

SEQ ID NO: 798364 - protein, 5 aa, unidentified
AGMTP

SEQ ID NO: 798365 - protein, 5 aa, unidentified
SGLAL

SEQ ID NO: 798366 - protein, 5 aa, unidentified
LGIGL

SEQ ID NO: 798367 - protein, 5 aa, unidentified
CRCVS

SEQ ID NO: 798368 - protein, 5 aa, unidentified
LGFAP

SEQ ID NO: 798369 - protein, 5 aa, unidentified
LGFVP

SEQ ID NO: 798370 - protein, 5 aa, unidentified
CRCVE

SEQ ID NO: 798371 - protein, 5 aa, unidentified
SGLGA

SEQ ID NO: 798372 - protein, 5 aa, unidentified
TGLDV

SEQ ID NO: 798373 - protein, 5 aa, unidentified
SGTVP

SEQ ID NO: 798374 - protein, 5 aa, unidentified
AGLGL

SEQ ID NO: 798375 - protein, 5 aa, unidentified
FGLTS

SEQ ID NO: 798376 - protein, 5 aa, unidentified
CRKVS

SEQ ID NO: 798377 - protein, 5 aa, unidentified
LGLTS

SEQ ID NO: 798378 - protein, 5 aa, unidentified
TGLIP

SEQ ID NO: 798379 - protein, 5 aa, unidentified
FGVVP

SEQ ID NO: 798380 - protein, 5 aa, unidentified
GGLTG

SEQ ID NO: 798381 - protein, 5 aa, unidentified
SGAVS

SEQ ID NO: 798382 - protein, 5 aa, unidentified
CGLVR

SEQ ID NO: 798383 - protein, 5 aa, unidentified
CRTVD

SEQ ID NO: 798384 - protein, 5 aa, unidentified
FGMVP

SEQ ID NO: 798385 - protein, 5 aa, unidentified
TGLVS

SEQ ID NO: 798386 - protein, 5 aa, unidentified
CRLGI

SEQ ID NO: 798387 - protein, 5 aa, unidentified
IGITP

SEQ ID NO: 798388 - protein, 5 aa, unidentified
IGMIP

SEQ ID NO: 798389 - protein, 5 aa, unidentified
LGLQP

SEQ ID NO: 798390 - protein, 5 aa, unidentified
SGTTP

SEQ ID NO: 798391 - protein, 5 aa, unidentified
CGLGL

SEQ ID NO: 798392 - protein, 5 aa, unidentified
LGLTA

SEQ ID NO: 798393 - protein, 5 aa, unidentified
FGLTG

SEQ ID NO: 798394 - protein, 5 aa, unidentified
GGLVP

SEQ ID NO: 798395 - protein, 5 aa, unidentified
IGFVP

SEQ ID NO: 798396 - protein, 5 aa, unidentified
CRCVN

SEQ ID NO: 798397 - protein, 5 aa, unidentified
AGLAA

SEQ ID NO: 798398 - protein, 5 aa, unidentified
AGMVP

SEQ ID NO: 798399 - protein, 5 aa, unidentified
AGLTS

SEQ ID NO: 798400 - protein, 5 aa, unidentified
CGFAV

SEQ ID NO: 798401 - protein, 5 aa, unidentified
CGLAI

SEQ ID NO: 798402 - protein, 5 aa, unidentified
AGLGI

SEQ ID NO: 798403 - protein, 5 aa, unidentified
CRCVP

SEQ ID NO: 798404 - protein, 5 aa, unidentified
CRLVT

SEQ ID NO: 798405 - protein, 5 aa, unidentified
ARLIK

SEQ ID NO: 798406 - protein, 5 aa, unidentified
FGLRP

SEQ ID NO: 798407 - protein, 5 aa, unidentified
SGAVA

SEQ ID NO: 798408 - protein, 5 aa, unidentified
AGLGT

SEQ ID NO: 798409 - protein, 5 aa, unidentified
CGLGV

SEQ ID NO: 798410 - protein, 5 aa, unidentified
SGLAI

SEQ ID NO: 798411 - protein, 5 aa, unidentified
ARCVG

SEQ ID NO: 798412 - protein, 5 aa, unidentified
LGLTR

SEQ ID NO: 798413 - protein, 5 aa, unidentified
CGIGL

SEQ ID NO: 798414 - protein, 5 aa, unidentified
FGITP

SEQ ID NO: 798415 - protein, 5 aa, unidentified
LGFTP

SEQ ID NO: 798416 - protein, 5 aa, unidentified
VGMVP

SEQ ID NO: 798417 - protein, 5 aa, unidentified
LGLMP

SEQ ID NO: 798418 - protein, 5 aa, unidentified
SRLVR

SEQ ID NO: 798419 - protein, 5 aa, unidentified
TGLTS

SEQ ID NO: 798420 - protein, 5 aa, unidentified
VGLTS

SEQ ID NO: 798421 - protein, 5 aa, unidentified
CRAVD

SEQ ID NO: 798422 - protein, 5 aa, unidentified
CRAVK

SEQ ID NO: 798423 - protein, 5 aa, unidentified
CGLCA

SEQ ID NO: 798424 - protein, 5 aa, unidentified
CRVVP

SEQ ID NO: 798425 - protein, 5 aa, unidentified
LGLVA

SEQ ID NO: 798426 - protein, 5 aa, unidentified
SGLGV

SEQ ID NO: 798427 - protein, 5 aa, unidentified
VGLTT

SEQ ID NO: 798428 - protein, 5 aa, unidentified
ARLIR

SEQ ID NO: 798429 - protein, 5 aa, unidentified
SGFGI

SEQ ID NO: 798430 - protein, 5 aa, unidentified
TGMCP

SEQ ID NO: 798431 - protein, 5 aa, unidentified
CRCVQ

SEQ ID NO: 798432 - protein, 5 aa, unidentified
IGMVP

SEQ ID NO: 798433 - protein, 5 aa, unidentified
AGLVS

SEQ ID NO: 798434 - protein, 5 aa, unidentified
ARCVP

SEQ ID NO: 798435 - protein, 5 aa, unidentified
LGLHP

SEQ ID NO: 798436 - protein, 5 aa, unidentified
VGLQP

SEQ ID NO: 798437 - protein, 5 aa, unidentified
GRLVK

SEQ ID NO: 798438 - protein, 5 aa, unidentified
LGMRP

SEQ ID NO: 798439 - protein, 5 aa, unidentified
SGLVA

SEQ ID NO: 798440 - protein, 5 aa, unidentified
CRTVE

SEQ ID NO: 798441 - protein, 5 aa, unidentified
VGIIP

SEQ ID NO: 798442 - protein, 5 aa, unidentified
AGLGG

SEQ ID NO: 798443 - protein, 5 aa, unidentified
CRMVD

SEQ ID NO: 798444 - protein, 5 aa, unidentified
IGLRP

SEQ ID NO: 798445 - protein, 5 aa, unidentified
CRLVR

SEQ ID NO: 798446 - protein, 5 aa, unidentified
LGLLP

SEQ ID NO: 798447 - protein, 5 aa, unidentified
LGLTC

SEQ ID NO: 798448 - protein, 5 aa, unidentified
TGLVG

SEQ ID NO: 798449 - protein, 5 aa, unidentified
AGIGL

SEQ ID NO: 798450 - protein, 5 aa, unidentified
FGLTC

SEQ ID NO: 798451 - protein, 5 aa, unidentified
AGLGV

SEQ ID NO: 798452 - protein, 5 aa, unidentified
ARCVS

SEQ ID NO: 798453 - protein, 5 aa, unidentified
CGLIK

SEQ ID NO: 798454 - protein, 5 aa, unidentified
GALTP

SEQ ID NO: 798455 - protein, 5 aa, unidentified
IGIIP

SEQ ID NO: 798456 - protein, 5 aa, unidentified
MGIGL

SEQ ID NO: 798457 - protein, 5 aa, unidentified
SGLDI

SEQ ID NO: 798458 - protein, 5 aa, unidentified
TGCCP

SEQ ID NO: 798459 - protein, 5 aa, unidentified
VGLEP

SEQ ID NO: 798460 - protein, 5 aa, unidentified
AGLVA

SEQ ID NO: 798461 - protein, 5 aa, unidentified
CGLTA

SEQ ID NO: 798462 - protein, 5 aa, unidentified
CRLAP

SEQ ID NO: 798463 - protein, 5 aa, unidentified
CMLVR

SEQ ID NO: 798464 - protein, 5 aa, unidentified
CRTVA

SEQ ID NO: 798465 - protein, 5 aa, unidentified
VGFVP

SEQ ID NO: 798466 - protein, 5 aa, unidentified
IGLAV

SEQ ID NO: 798467 - protein, 5 aa, unidentified
IGLTT

SEQ ID NO: 798468 - protein, 5 aa, unidentified
TGLCG

SEQ ID NO: 798469 - protein, 5 aa, unidentified
ARCVK

SEQ ID NO: 798470 - protein, 5 aa, unidentified
ARLVP

SEQ ID NO: 798471 - protein, 5 aa, unidentified
LRLVP

SEQ ID NO: 798472 - protein, 5 aa, unidentified
AGLGS

SEQ ID NO: 798473 - protein, 5 aa, unidentified
GGIVA

SEQ ID NO: 798474 - protein, 5 aa, unidentified
IGFCP

SEQ ID NO: 798475 - protein, 5 aa, unidentified
VGFIP

SEQ ID NO: 798476 - protein, 5 aa, unidentified
AGMDI

SEQ ID NO: 798477 - protein, 5 aa, unidentified
CRTVK

SEQ ID NO: 798478 - protein, 5 aa, unidentified
MGIVP

SEQ ID NO: 798479 - protein, 5 aa, unidentified
VGFCP

SEQ ID NO: 798480 - protein, 5 aa, unidentified
CRCVA

SEQ ID NO: 798481 - protein, 5 aa, unidentified
VGFDP

SEQ ID NO: 798482 - protein, 5 aa, unidentified
CGFGI

SEQ ID NO: 798483 - protein, 5 aa, unidentified
CGLIP

SEQ ID NO: 798484 - protein, 5 aa, unidentified
CRLGV

SEQ ID NO: 798485 - protein, 5 aa, unidentified
GGLGL

SEQ ID NO: 798486 - protein, 5 aa, unidentified
SGLTG

SEQ ID NO: 798487 - protein, 5 aa, unidentified
CAVCP

SEQ ID NO: 798488 - protein, 5 aa, unidentified
CGFGV

SEQ ID NO: 798489 - protein, 5 aa, unidentified
LGLTG

SEQ ID NO: 798490 - protein, 5 aa, unidentified
LGTVP

SEQ ID NO: 798491 - protein, 5 aa, unidentified
SGFAV

SEQ ID NO: 798492 - protein, 5 aa, unidentified
SGMVS

SEQ ID NO: 798493 - protein, 5 aa, unidentified
TGLTC

SEQ ID NO: 798494 - protein, 5 aa, unidentified
AGFVP

SEQ ID NO: 798495 - protein, 5 aa, unidentified
AGLIK

SEQ ID NO: 798496 - protein, 5 aa, unidentified
CGLSV

SEQ ID NO: 798497 - protein, 5 aa, unidentified
YGLVP

SEQ ID NO: 798498 - protein, 5 aa, unidentified
AGFTP

SEQ ID NO: 798499 - protein, 5 aa, unidentified
AGLAT

SEQ ID NO: 798500 - protein, 5 aa, unidentified
AGLVG

SEQ ID NO: 798501 - protein, 5 aa, unidentified
ARCVN

SEQ ID NO: 798502 - protein, 5 aa, unidentified
AGIVS

SEQ ID NO: 798503 - protein, 5 aa, unidentified
FGLTQ

SEQ ID NO: 798504 - protein, 5 aa, unidentified
FGVTP

SEQ ID NO: 798505 - protein, 5 aa, unidentified
LGLPP

SEQ ID NO: 798506 - protein, 5 aa, unidentified
AGLAS

SEQ ID NO: 798507 - protein, 5 aa, unidentified
CRVVK

SEQ ID NO: 798508 - protein, 5 aa, unidentified
FGLSP

SEQ ID NO: 798509 - protein, 5 aa, unidentified
IGMDI

SEQ ID NO: 798510 - protein, 5 aa, unidentified
LGMIP

SEQ ID NO: 798511 - protein, 5 aa, unidentified
LRSTP

SEQ ID NO: 798512 - protein, 5 aa, unidentified
PGLTP

SEQ ID NO: 798513 - protein, 5 aa, unidentified
PGLVP

SEQ ID NO: 798514 - protein, 5 aa, unidentified
SGLIP

SEQ ID NO: 798515 - protein, 5 aa, unidentified
ARLVT

SEQ ID NO: 798516 - protein, 5 aa, unidentified
CRLSI

SEQ ID NO: 798517 - protein, 5 aa, unidentified
FGLCP

SEQ ID NO: 798518 - protein, 5 aa, unidentified
LGLAT

SEQ ID NO: 798519 - protein, 5 aa, unidentified
LGLGP

SEQ ID NO: 798520 - protein, 5 aa, unidentified
VGLGL

SEQ ID NO: 798521 - protein, 5 aa, unidentified
VGLMP

SEQ ID NO: 798522 - protein, 5 aa, unidentified
YGMTP

SEQ ID NO: 798523 - protein, 5 aa, unidentified
CRLIK

SEQ ID NO: 798524 - protein, 5 aa, unidentified
CRMVE

SEQ ID NO: 798525 - protein, 5 aa, unidentified
IGLTG

SEQ ID NO: 798526 - protein, 5 aa, unidentified
LRTAP

SEQ ID NO: 798527 - DNA, 24 bp, unidentified
  source 1..24: mol_type = unassigned DNA
gggtaaacccgctcctaccccaat

SEQ ID NO: 798528 - DNA, 24 bp, unidentified
  source 1..24: mol_type = unassigned DNA
ggccatagaatcttgtatggtagg

SEQ ID NO: 798529 - DNA, 24 bp, unidentified
  source 1..24: mol_type = unassigned DNA
gtccactaattcaggctaacccca

SEQ ID NO: 798530 - DNA, 24 bp, unidentified
  source 1..24: mol_type = unassigned DNA
catagaagggtctctaatggttat

SEQ ID NO: 798531 - DNA, 24 bp, unidentified
  source 1..24: mol_type = unassigned DNA
cttcgacttcgctcaggatgagcg

SEQ ID NO: 798532 - DNA, 24 bp, unidentified
  source 1..24: mol_type = unassigned DNA
caacacggatacttgtcttatggc

SEQ ID NO: 798533 - DNA, 24 bp, unidentified
  source 1..24: mol_type = unassigned DNA
gctcgcggcctagtgtcctgtccc

SEQ ID NO: 798534 - DNA, 24 bp, unidentified
  source 1..24: mol_type = unassigned DNA
gcgaccatatcagacatgatggtc

SEQ ID NO: 798535 - DNA, 24 bp, unidentified
  source 1..24: mol_type = unassigned DNA
ccttctcggacagggctctcagaa

SEQ ID NO: 798536 - DNA, 24 bp, unidentified
  source 1..24: mol_type = unassigned DNA
cccaatcagagagatggggtgatt

SEQ ID NO: 798537 - DNA, 24 bp, unidentified
  source 1..24: mol_type = unassigned DNA
tccccgtagggcgaataaccgctc

SEQ ID NO: 798538 - DNA, 24 bp, unidentified
  source 1..24: mol_type = unassigned DNA
gagtccatatacaatgaaatggac

SEQ ID NO: 798539 - protein, 97 aa, unidentified; identical to SEQ ID NO: 795565
  VARIANT 2: note = Any amino acid
  VARIANT 3: note = Any amino acid
  VARIANT 4: note = Any amino acid
  VARIANT 5: note = Any amino acid
  VARIANT 6: note = Any amino acid
  VARIANT 7: note = Any amino acid
  VARIANT 8: note = Any amino acid
  VARIANT 9: note = Any amino acid
  VARIANT 10: note = Any amino acid
  VARIANT 11: note = Any amino acid
  VARIANT 12: note = Any amino acid
  VARIANT 13: note = Any amino acid
  VARIANT 14: note = Any amino acid
  VARIANT 15: note = Any amino acid
  VARIANT 16: note = Any amino acid
  VARIANT 17: note = Any amino acid
  VARIANT 18: note = Any amino acid
  VARIANT 19: note = Any amino acid
  VARIANT 20: note = Any amino acid
  VARIANT 21: note = Any amino acid
  VARIANT 22: note = Any amino acid
  VARIANT 23: note = Any amino acid
  VARIANT 24: note = Any amino acid
  VARIANT 25: note = Any amino acid
  VARIANT 26: note = Any amino acid
  VARIANT 27: note = Any amino acid
  VARIANT 28: note = Any amino acid
  VARIANT 29: note = Any amino acid
  VARIANT 30: note = Any amino acid
  VARIANT 31: note = Any amino acid
  VARIANT 32: note = Any amino acid
  VARIANT 33: note = Any amino acid
  VARIANT 34: note = Any amino acid
  VARIANT 35: note = Any amino acid
  VARIANT 36: note = Any amino acid
  VARIANT 37: note = Any amino acid
  VARIANT 38: note = Any amino acid
  VARIANT 39: note = Any amino acid
  VARIANT 40: note = Any amino acid
  VARIANT 41: note = Any amino acid
  VARIANT 42: note = Any amino acid
  VARIANT 43: note = Any amino acid
  VARIANT 44: note = Any amino acid
  VARIANT 45: note = Any amino acid
  VARIANT 46: note = Any amino acid
  VARIANT 47: note = Any amino acid
  VARIANT 48: note = Any amino acid
  VARIANT 49: note = Any amino acid
  VARIANT 50: note = Any amino acid
  VARIANT 51: note = Any amino acid
  VARIANT 53: note = Any amino acid
  VARIANT 54: note = Any amino acid
  VARIANT 55: note = Any amino acid
  VARIANT 56: note = Any amino acid
  VARIANT 57: note = Any amino acid
  VARIANT 58: note = Any amino acid
  VARIANT 59: note = Any amino acid
  VARIANT 60: note = Any amino acid
  VARIANT 61: note = Any amino acid
  VARIANT 62: note = Any amino acid
  VARIANT 63: note = Any amino acid
  VARIANT 64: note = Any amino acid
  VARIANT 65: note = Any amino acid
  VARIANT 66: note = Any amino acid
  VARIANT 67: note = Any amino acid
  VARIANT 68: note = Any amino acid
  VARIANT 69: note = Any amino acid
  VARIANT 70: note = Any amino acid
  VARIANT 71: note = Any amino acid
  VARIANT 72: note = Any amino acid
  VARIANT 73: note = Any amino acid
  VARIANT 74: note = Any amino acid
  VARIANT 75: note = Any amino acid
  VARIANT 76: note = Any amino acid
  VARIANT 77: note = Any amino acid
  VARIANT 78: note = Any amino acid
  VARIANT 79: note = Any amino acid
  VARIANT 80: note = Any amino acid
  VARIANT 81: note = Any amino acid
  VARIANT 82: note = Any amino acid
  VARIANT 83: note = Any amino acid
  VARIANT 84: note = Any amino acid
  VARIANT 85: note = Any amino acid
  VARIANT 86: note = Any amino acid
  VARIANT 87: note = Any amino acid
  VARIANT 88: note = Any amino acid
  VARIANT 89: note = Any amino acid
  VARIANT 90: note = Any amino acid
  VARIANT 91: note = Any amino acid
  VARIANT 93: note = Any amino acid
  VARIANT 95: note = Any amino acid
  VARIANT 96: note = Any amino acid

SEQ ID NO: 798540 - protein, 102 aa, unidentified; identical to SEQ ID NO: 795566
  VARIANT 2: note = Any amino acid
  VARIANT 3: note = Any amino acid
  VARIANT 4: note = Any amino acid
  VARIANT 5: note = Any amino acid
  VARIANT 6: note = Any amino acid
  VARIANT 7: note = Any amino acid
  VARIANT 8: note = Any amino acid
  VARIANT 9: note = Any amino acid
  VARIANT 10: note = Any amino acid
  VARIANT 11: note = Any amino acid
  VARIANT 12: note = Any amino acid
  VARIANT 13: note = Any amino acid
  VARIANT 14: note = Any amino acid
  VARIANT 15: note = Any amino acid
  VARIANT 16: note = Any amino acid
  VARIANT 17: note = Any amino acid
  VARIANT 18: note = Any amino acid
  VARIANT 19: note = Any amino acid
  VARIANT 20: note = Any amino acid
  VARIANT 21: note = Any amino acid
  VARIANT 22: note = Any amino acid
  VARIANT 23: note = Any amino acid
  VARIANT 24: note = Any amino acid
  VARIANT 25: note = Any amino acid
  VARIANT 26: note = Any amino acid
  VARIANT 27: note = Any amino acid
  VARIANT 28: note = Any amino acid
  VARIANT 29: note = Any amino acid
  VARIANT 30: note = Any amino acid
  VARIANT 31: note = Any amino acid
  VARIANT 32: note = Any amino acid
  VARIANT 33: note = Any amino acid
  VARIANT 34: note = Any amino acid
  VARIANT 35: note = Any amino acid
  VARIANT 36: note = Any amino acid
  VARIANT 37: note = Any amino acid
  VARIANT 38: note = Any amino acid
  VARIANT 39: note = Any amino acid
  VARIANT 40: note = Any amino acid
  VARIANT 41: note = Any amino acid
  VARIANT 42: note = Any amino acid
  VARIANT 43: note = Any amino acid
  VARIANT 44: note = Any amino acid
  VARIANT 45: note = Any amino acid
  VARIANT 46: note = Any amino acid
  VARIANT 47: note = Any amino acid
  VARIANT 48: note = Any amino acid
  VARIANT 49: note = Any amino acid
  VARIANT 50: note = Any amino acid
  VARIANT 51: note = Any amino acid
  VARIANT 52: note = Any amino acid
  VARIANT 53: note = Any amino acid
  VARIANT 54: note = Any amino acid
  VARIANT 55: note = Any amino acid
  VARIANT 57: note = Any amino acid
  VARIANT 58: note = Any amino acid
  VARIANT 59: note = Any amino acid
  VARIANT 60: note = Any amino acid
  VARIANT 61: note = Any amino acid
  VARIANT 62: note = Any amino acid
  VARIANT 63: note = Any amino acid
  VARIANT 64: note = Any amino acid
  VARIANT 65: note = Any amino acid
  VARIANT 66: note = Any amino acid
  VARIANT 67: note = Any amino acid
  VARIANT 68: note = Any amino acid
  VARIANT 69: note = Any amino acid
  VARIANT 70: note = Any amino acid
  VARIANT 71: note = Any amino acid
  VARIANT 72: note = Any amino acid
  VARIANT 73: note = Any amino acid
  VARIANT 74: note = Any amino acid
  VARIANT 75: note = Any amino acid
  VARIANT 76: note = Any amino acid
  VARIANT 77: note = Any amino acid
  VARIANT 78: note = Any amino acid
  VARIANT 79: note = Any amino acid
  VARIANT 80: note = Any amino acid
  VARIANT 81: note = Any amino acid
  VARIANT 82: note = Any amino acid
  VARIANT 83: note = Any amino acid
  VARIANT 84: note = Any amino acid
  VARIANT 85: note = Any amino acid
  VARIANT 86: note = Any amino acid
  VARIANT 87: note = Any amino acid
  VARIANT 88: note = Any amino acid
  VARIANT 89: note = Any amino acid
  VARIANT 90: note = Any amino acid
  VARIANT 91: note = Any amino acid
  VARIANT 92: note = Any amino acid
  VARIANT 93: note = Any amino acid
  VARIANT 94: note = Any amino acid
  VARIANT 95: note = Any amino acid
  VARIANT 96: note = Any amino acid
  VARIANT 98: note = Any amino acid
  VARIANT 100: note = Any amino acid
  VARIANT 101: note = Any amino acid
  VARIANT 2..55: note = This region may encompass 41-54 residues
  VARIANT 57..96: note = This region may encompass 33-40 residues

SEQ ID NO: 798541 - protein, 102 aa, unidentified; identical to SEQ ID NO: 795566
  VARIANT 2: note = Any amino acid
  VARIANT 3: note = Any amino acid
  VARIANT 4: note = Any amino acid
  VARIANT 5: note = Any amino acid
  VARIANT 6: note = Any amino acid
  VARIANT 7: note = Any amino acid
  VARIANT 8: note = Any amino acid
  VARIANT 9: note = Any amino acid
  VARIANT 10: note = Any amino acid
  VARIANT 11: note = Any amino acid
  VARIANT 12: note = Any amino acid
  VARIANT 13: note = Any amino acid
  VARIANT 14: note = Any amino acid
  VARIANT 15: note = Any amino acid
  VARIANT 16: note = Any amino acid
  VARIANT 17: note = Any amino acid
  VARIANT 18: note = Any amino acid
  VARIANT 19: note = Any amino acid
  VARIANT 20: note = Any amino acid
  VARIANT 21: note = Any amino acid
  VARIANT 22: note = Any amino acid
  VARIANT 23: note = Any amino acid
  VARIANT 24: note = Any amino acid
  VARIANT 25: note = Any amino acid
  VARIANT 26: note = Any amino acid
  VARIANT 27: note = Any amino acid
  VARIANT 28: note = Any amino acid
  VARIANT 29: note = Any amino acid
  VARIANT 30: note = Any amino acid
  VARIANT 31: note = Any amino acid
  VARIANT 32: note = Any amino acid
  VARIANT 33: note = Any amino acid
  VARIANT 34: note = Any amino acid
  VARIANT 35: note = Any amino acid
  VARIANT 36: note = Any amino acid
  VARIANT 37: note = Any amino acid
  VARIANT 38: note = Any amino acid
  VARIANT 39: note = Any amino acid
  VARIANT 40: note = Any amino acid
  VARIANT 41: note = Any amino acid
  VARIANT 42: note = Any amino acid
  VARIANT 43: note = Any amino acid
  VARIANT 44: note = Any amino acid
  VARIANT 45: note = Any amino acid
  VARIANT 46: note = Any amino acid
  VARIANT 47: note = Any amino acid
  VARIANT 48: note = Any amino acid
  VARIANT 49: note = Any amino acid
  VARIANT 50: note = Any amino acid
  VARIANT 51: note = Any amino acid
  VARIANT 52: note = Any amino acid
  VARIANT 53: note = Any amino acid
  VARIANT 54: note = Any amino acid
  VARIANT 55: note = Any amino acid
  VARIANT 57: note = Any amino acid
  VARIANT 58: note = Any amino acid
  VARIANT 59: note = Any amino acid
  VARIANT 60: note = Any amino acid
  VARIANT 61: note = Any amino acid
  VARIANT 62: note = Any amino acid
  VARIANT 63: note = Any amino acid
  VARIANT 64: note = Any amino acid
  VARIANT 65: note = Any amino acid
  VARIANT 66: note = Any amino acid
  VARIANT 67: note = Any amino acid
  VARIANT 68: note = Any amino acid
  VARIANT 69: note = Any amino acid
  VARIANT 70: note = Any amino acid
  VARIANT 71: note = Any amino acid
  VARIANT 72: note = Any amino acid
  VARIANT 73: note = Any amino acid
  VARIANT 74: note = Any amino acid
  VARIANT 75: note = Any amino acid
  VARIANT 76: note = Any amino acid
  VARIANT 77: note = Any amino acid
  VARIANT 78: note = Any amino acid
  VARIANT 79: note = Any amino acid
  VARIANT 80: note = Any amino acid
  VARIANT 81: note = Any amino acid
  VARIANT 82: note = Any amino acid
  VARIANT 83: note = Any amino acid
  VARIANT 84: note = Any amino acid
  VARIANT 85: note = Any amino acid
  VARIANT 86: note = Any amino acid
  VARIANT 87: note = Any amino acid
  VARIANT 88: note = Any amino acid
  VARIANT 89: note = Any amino acid
  VARIANT 90: note = Any amino acid
  VARIANT 91: note = Any amino acid
  VARIANT 92: note = Any amino acid
  VARIANT 93: note = Any amino acid
  VARIANT 94: note = Any amino acid
  VARIANT 95: note = Any amino acid
  VARIANT 96: note = Any amino acid
  VARIANT 98: note = Any amino acid
  VARIANT 100: note = Any amino acid
  VARIANT 101: note = Any amino acid

SEQ ID NO: 798542 - protein, 93 aa, unidentified; identical to SEQ ID NO: 795599
  VARIANT 2: note = Any amino acid
  VARIANT 3: note = Any amino acid
  VARIANT 4: note = Any amino acid
  VARIANT 5: note = Any amino acid
  VARIANT 6: note = Any amino acid
  VARIANT 7: note = Any amino acid
  VARIANT 8: note = Any amino acid
  VARIANT 9: note = Any amino acid
  VARIANT 10: note = Any amino acid
  VARIANT 11: note = Any amino acid
  VARIANT 12: note = Any amino acid
  VARIANT 13: note = Any amino acid
  VARIANT 14: note = Any amino acid
  VARIANT 15: note = Any amino acid
  VARIANT 16: note = Any amino acid
  VARIANT 17: note = Any amino acid
  VARIANT 18: note = Any amino acid
  VARIANT 19: note = Any amino acid
  VARIANT 20: note = Any amino acid
  VARIANT 21: note = Any amino acid
  VARIANT 22: note = Any amino acid
  VARIANT 23: note = Any amino acid
  VARIANT 24: note = Any amino acid
  VARIANT 25: note = Any amino acid
  VARIANT 26: note = Any amino acid
  VARIANT 27: note = Any amino acid
  VARIANT 28: note = Any amino acid
  VARIANT 29: note = Any amino acid
  VARIANT 30: note = Any amino acid
  VARIANT 31: note = Any amino acid
  VARIANT 32: note = Any amino acid
  VARIANT 33: note = Any amino acid
  VARIANT 34: note = Any amino acid
  VARIANT 35: note = Any amino acid
  VARIANT 36: note = Any amino acid
  VARIANT 37: note = Any amino acid
  VARIANT 38: note = Any amino acid
  VARIANT 39: note = Any amino acid
  VARIANT 40: note = Any amino acid
  VARIANT 41: note = Any amino acid
  VARIANT 42: note = Any amino acid
  VARIANT 43: note = Any amino acid
  VARIANT 44: note = Any amino acid
  VARIANT 45: note = Any amino acid
  VARIANT 46: note = Any amino acid
  VARIANT 47: note = Any amino acid
  VARIANT 48: note = Any amino acid
  VARIANT 49: note = Any amino acid
  VARIANT 51: note = Any amino acid
  VARIANT 52: note = Any amino acid
  VARIANT 53: note = Any amino acid
  VARIANT 54: note = Any amino acid
  VARIANT 55: note = Any amino acid
  VARIANT 56: note = Any amino acid
  VARIANT 57: note = Any amino acid
  VARIANT 58: note = Any amino acid
  VARIANT 59: note = Any amino acid
  VARIANT 60: note = Any amino acid
  VARIANT 61: note = Any amino acid
  VARIANT 62: note = Any amino acid
  VARIANT 63: note = Any amino acid
  VARIANT 64: note = Any amino acid
  VARIANT 65: note = Any amino acid
  VARIANT 66: note = Any amino acid
  VARIANT 67: note = Any amino acid
  VARIANT 68: note = Any amino acid
  VARIANT 69: note = Any amino acid
  VARIANT 70: note = Any amino acid
  VARIANT 71: note = Any amino acid
  VARIANT 72: note = Any amino acid
  VARIANT 73: note = Any amino acid
  VARIANT 74: note = Any amino acid
  VARIANT 75: note = Any amino acid
  VARIANT 76: note = Any amino acid
  VARIANT 77: note = Any amino acid
  VARIANT 78: note = Any amino acid
  VARIANT 79: note = Any amino acid
  VARIANT 80: note = Any amino acid
  VARIANT 81: note = Any amino acid
  VARIANT 82: note = Any amino acid
  VARIANT 83: note = Any amino acid
  VARIANT 84: note = Any amino acid
  VARIANT 85: note = Any amino acid
  VARIANT 86: note = Any amino acid
  VARIANT 87: note = Any amino acid
  VARIANT 89: note = Any amino acid
  VARIANT 91: note = Any amino acid
  VARIANT 92: note = Any amino acid
  VARIANT 2..49: note = This region may encompass 42-48 residues
  VARIANT 51..87: note = This region may encompass 34-37 residues

SEQ ID NO: 798543 - protein, 92 aa, unidentified; identical to SEQ ID NO: 795671
  VARIANT 2: note = Any amino acid
  VARIANT 3: note = Any amino acid
  VARIANT 4: note = Any amino acid
  VARIANT 5: note = Any amino acid
  VARIANT 6: note = Any amino acid
  VARIANT 7: note = Any amino acid
  VARIANT 8: note = Any amino acid
  VARIANT 9: note = Any amino acid
  VARIANT 10: note = Any amino acid
  VARIANT 11: note = Any amino acid
  VARIANT 12: note = Any amino acid
  VARIANT 13: note = Any amino acid
  VARIANT 14: note = Any amino acid
  VARIANT 15: note = Any amino acid
  VARIANT 16: note = Any amino acid
  VARIANT 17: note = Any amino acid
  VARIANT 18: note = Any amino acid
  VARIANT 19: note = Any amino acid
  VARIANT 20: note = Any amino acid
  VARIANT 21: note = Any amino acid
  VARIANT 22: note = Any amino acid
  VARIANT 23: note = Any amino acid
  VARIANT 24: note = Any amino acid
  VARIANT 25: note = Any amino acid
  VARIANT 26: note = Any amino acid
  VARIANT 27: note = Any amino acid
  VARIANT 28: note = Any amino acid
  VARIANT 29: note = Any amino acid
  VARIANT 30: note = Any amino acid
  VARIANT 31: note = Any amino acid
  VARIANT 32: note = Any amino acid
  VARIANT 33: note = Any amino acid
  VARIANT 34: note = Any amino acid
  VARIANT 35: note = Any amino acid
  VARIANT 36: note = Any amino acid
  VARIANT 37: note = Any amino acid
  VARIANT 38: note = Any amino acid
  VARIANT 39: note = Any amino acid
  VARIANT 40: note = Any amino acid
  VARIANT 41: note = Any amino acid
  VARIANT 42: note = Any amino acid
  VARIANT 43: note = Any amino acid
  VARIANT 44: note = Any amino acid
  VARIANT 45: note = Any amino acid
  VARIANT 46: note = Any amino acid
  VARIANT 47: note = Any amino acid
  VARIANT 48: note = Any amino acid
  VARIANT 49: note = Any amino acid
  VARIANT 51: note = Any amino acid
  VARIANT 52: note = Any amino acid
  VARIANT 53: note = Any amino acid
  VARIANT 54: note = Any amino acid
  VARIANT 55: note = Any amino acid
  VARIANT 56: note = Any amino acid
  VARIANT 57: note = Any amino acid
  VARIANT 58: note = Any amino acid
  VARIANT 59: note = Any amino acid
  VARIANT 60: note = Any amino acid
  VARIANT 61: note = Any amino acid
  VARIANT 62: note = Any amino acid
  VARIANT 63: note = Any amino acid
  VARIANT 64: note = Any amino acid
  VARIANT 65: note = Any amino acid
  VARIANT 66: note = Any amino acid
  VARIANT 67: note = Any amino acid
  VARIANT 68: note = Any amino acid
  VARIANT 69: note = Any amino acid
  VARIANT 70: note = Any amino acid
  VARIANT 71: note = Any amino acid
  VARIANT 72: note = Any amino acid
  VARIANT 73: note = Any amino acid
  VARIANT 74: note = Any amino acid
  VARIANT 75: note = Any amino acid
  VARIANT 76: note = Any amino acid
  VARIANT 77: note = Any amino acid
  VARIANT 78: note = Any amino acid
  VARIANT 79: note = Any amino acid
  VARIANT 80: note = Any amino acid
  VARIANT 81: note = Any amino acid
  VARIANT 82: note = Any amino acid
  VARIANT 83: note = Any amino acid
  VARIANT 84: note = Any amino acid
  VARIANT 85: note = Any amino acid
  VARIANT 86: note = Any amino acid
  VARIANT 88: note = Any amino acid
  VARIANT 90: note = Any amino acid
  VARIANT 91: note = Any amino acid
  VARIANT 2..49: note = This region may encompass 42-48 residues
  VARIANT 51..86: note = This region may encompass 34-36 residues

SEQ ID NO: 798544 - protein, 88 aa, unidentified; identical to SEQ ID NO: 795759
  VARIANT 2: note = Any amino acid
  VARIANT 3: note = Any amino acid
  VARIANT 4: note = Any amino acid
  VARIANT 5: note = Any amino acid
  VARIANT 6: note = Any amino acid
  VARIANT 7: note = Any amino acid
  VARIANT 8: note = Any amino acid
  VARIANT 9: note = Any amino acid
  VARIANT 10: note = Any amino acid
  VARIANT 11: note = Any amino acid
  VARIANT 12: note = Any amino acid
  VARIANT 13: note = Any amino acid
  VARIANT 14: note = Any amino acid
  VARIANT 15: note = Any amino acid
  VARIANT 16: note = Any amino acid
  VARIANT 17: note = Any amino acid
  VARIANT 18: note = Any amino acid
  VARIANT 19: note = Any amino acid
  VARIANT 20: note = Any amino acid
  VARIANT 21: note = Any amino acid
  VARIANT 22: note = Any amino acid
  VARIANT 23: note = Any amino acid
  VARIANT 24: note = Any amino acid
  VARIANT 25: note = Any amino acid
  VARIANT 26: note = Any amino acid
  VARIANT 27: note = Any amino acid
  VARIANT 28: note = Any amino acid
  VARIANT 29: note = Any amino acid
  VARIANT 30: note = Any amino acid
  VARIANT 31: note = Any amino acid
  VARIANT 32: note = Any amino acid
  VARIANT 33: note = Any amino acid
  VARIANT 34: note = Any amino acid
  VARIANT 35: note = Any amino acid
  VARIANT 36: note = Any amino acid
  VARIANT 37: note = Any amino acid
  VARIANT 38: note = Any amino acid
  VARIANT 39: note = Any amino acid
  VARIANT 40: note = Any amino acid
  VARIANT 41: note = Any amino acid
  VARIANT 42: note = Any amino acid
  VARIANT 43: note = Any amino acid
  VARIANT 44: note = Any amino acid
  VARIANT 45: note = Any amino acid
  VARIANT 46: note = Any amino acid
  VARIANT 48: note = Any amino acid
  VARIANT 49: note = Any amino acid
  VARIANT 50: note = Any amino acid
  VARIANT 51: note = Any amino acid
  VARIANT 52: note = Any amino acid
  VARIANT 53: note = Any amino acid
  VARIANT 54: note = Any amino acid
  VARIANT 55: note = Any amino acid
  VARIANT 56: note = Any amino acid
  VARIANT 57: note = Any amino acid
  VARIANT 58: note = Any amino acid
  VARIANT 59: note = Any amino acid
  VARIANT 60: note = Any amino acid
  VARIANT 61: note = Any amino acid
  VARIANT 62: note = Any amino acid
  VARIANT 63: note = Any amino acid
  VARIANT 64: note = Any amino acid
  VARIANT 65: note = Any amino acid
  VARIANT 66: note = Any amino acid
  VARIANT 67: note = Any amino acid
  VARIANT 68: note = Any amino acid
  VARIANT 69: note = Any amino acid
  VARIANT 70: note = Any amino acid
  VARIANT 71: note = Any amino acid
  VARIANT 72: note = Any amino acid
  VARIANT 73: note = Any amino acid
  VARIANT 74: note = Any amino acid
  VARIANT 75: note = Any amino acid
  VARIANT 76: note = Any amino acid
  VARIANT 77: note = Any amino acid
  VARIANT 78: note = Any amino acid
  VARIANT 79: note = Any amino acid
  VARIANT 80: note = Any amino acid
  VARIANT 81: note = Any amino acid
  VARIANT 82: note = Any amino acid
  VARIANT 84: note = Any amino acid
  VARIANT 86: note = Any amino acid
  VARIANT 87: note = Any amino acid
  VARIANT 2..46: note = This region may encompass 42-45 residues
  VARIANT 48..82: note = This region may encompass 34-35 residues

SEQ ID NO: 798545 - protein, 53 aa, unidentified; identical to SEQ ID NO: 797068
  VARIANT 2: note = Any amino acid
  VARIANT 3: note = Any amino acid
  VARIANT 4: note = Any amino acid
  VARIANT 5: note = Any amino acid
  VARIANT 6: note = Any amino acid
  VARIANT 7: note = Any amino acid
  VARIANT 8: note = Any amino acid
  VARIANT 9: note = Any amino acid
  VARIANT 10: note = Any amino acid
  VARIANT 11: note = Any amino acid
  VARIANT 12: note = Any amino acid
  VARIANT 13: note = Any amino acid
  VARIANT 14: note = Any amino acid
  VARIANT 15: note = Any amino acid
  VARIANT 16: note = Any amino acid
  VARIANT 17: note = Any amino acid
  VARIANT 18: note = Any amino acid
  VARIANT 19: note = Any amino acid
  VARIANT 20: note = Any amino acid
  VARIANT 21: note = Any amino acid
  VARIANT 22: note = Any amino acid
  VARIANT 23: note = Any amino acid
  VARIANT 24: note = Any amino acid
  VARIANT 25: note = Any amino acid
  VARIANT 26: note = Any amino acid
  VARIANT 27: note = Any amino acid
  VARIANT 28: note = Any amino acid
  VARIANT 29: note = Any amino acid
  VARIANT 30: note = Any amino acid
  VARIANT 32: note = Any amino acid
  VARIANT 33: note = Any amino acid
  VARIANT 34: note = Any amino acid
  VARIANT 35: note = Any amino acid
  VARIANT 36: note = Any amino acid
  VARIANT 37: note = Any amino acid
  VARIANT 38: note = Any amino acid
  VARIANT 41: note = Any amino acid
  VARIANT 42: note = Any amino acid
  VARIANT 43: note = Any amino acid
  VARIANT 44: note = Any amino acid
  VARIANT 45: note = Any amino acid
  VARIANT 46: note = Any amino acid
  VARIANT 47: note = Any amino acid
  VARIANT 48: note = Any amino acid
  VARIANT 49: note = Any amino acid
  VARIANT 50: note = Any amino acid
  VARIANT 51: note = Any amino acid
  VARIANT 52: note = Any amino acid
  VARIANT 2..30: note = This region may encompass 28-29 residues
  VARIANT 41..52: note = This region may encompass 10-12 residues

SEQ ID NO: 798546 - DNA, 11 bp, unidentified
  source 1..11: mol_type = unassigned DNA
gggacccctac

SEQ ID NO: 798547 - DNA, 25 bp, unidentified
  source 1..25: mol_type = unassigned DNA
  misc_difference 1..6: note = a, c, t, g, unknown, or other
nnnnnnacagtatcttgtattatcc

SEQ ID NO: 798548 - DNA, 25 bp, unidentified
  source 1..25: mol_type = unassigned DNA
  misc_difference 18..25: note = a, c, t, g, unknown, or other
ataataacagtatcttgnnnnnnnn

SEQ ID NO: 798549 - DNA, 14 bp, unidentified
  source 1..14: mol_type = unassigned DNA
gggacccctagctg

SEQ ID NO: 798550 - DNA, 50 bp, unidentified
  source 1..50: mol_type = unassigned DNA
tccatttcaggtgtcgtgattagggaccccttgtattatccggatgccgc

SEQ ID NO: 798551 - DNA, 40 bp, unidentified
  source 1..40: mol_type = unassigned DNA
gtgtcgtgattagggaccccttgtattatccggatgccgc

SEQ ID NO: 798552 - DNA, 16 bp, unidentified
  source 1..16: mol_type = unassigned DNA
ttatcaggcctacgtc

SEQ ID NO: 798553 - DNA, 16 bp, unidentified
  source 1..16: mol_type = unassigned DNA
taacagtatcttgtat

SEQ ID NO: 798554 - DNA, 93 bp, unidentified
  source 1..93: mol_type = unassigned DNA
  misc_difference 67: note = a, c, t, g, unknown, or other
  misc_difference 87: note = a, c, t, g, unknown, or other
gtcctgaagcgcgctcccggggaggtgttgcagccatggctacggcagccggcgcgaccttgtattnatcccttcagtgcagggagnagccgc

SEQ ID NO: 798555 - DNA, 93 bp, unidentified
  source 1..93: mol_type = unassigned DNA
  misc_difference 4: note = a, c, t, g, unknown, or other
  misc_difference 67: note = a, c, t, g, unknown, or other
  misc_difference 87: note = a, c, t, g, unknown, or other
gtcntgaagcgcgctcccggggaggtgttgcagccatggctacggcagccggcgcgaccttgtattnatcccttcagtgcagggagnagccgc

SEQ ID NO: 798556 - DNA, 51 bp, unidentified
  source 1..51: mol_type = unassigned DNA
cggcagccggcgcgaccttgtatttatcccttcagtgcagggagtagccgc

SEQ ID NO: 798557 - DNA, 49 bp, unidentified
  source 1..49: mol_type = unassigned DNA
atggtcactgggcacggttgtgctgcaaataacacgccctaacaataca

SEQ ID NO: 798558 - DNA, 80 bp, unidentified
  source 1..80: mol_type = unassigned DNA
  misc_difference 17: note = a, c, t, g, unknown, or other
ggcaagtccgcaaagtnagtctgtggtgaatggcaaaagcgcgatgttcctgcctcagatgctttccagcgaagctcacc

SEQ ID NO: 798559 - DNA, 26 bp, unidentified
  source 1..26: mol_type = unassigned DNA
ggcaagtccgcaaagttagtctgtgg
